United States Patent Application Publication US 2024/0410020 A1 - sequence listing, part 3

SEQ ID NO: 34739 - DNA, 120 bp, Homo sapiens
aggcggcagcctgggggtcctggcagtcctccagcagagaggaccccaggctcccattccttgggctggtgcaaggctctggtctgtgtcccctggggagcctcccagcacaggcagccc

SEQ ID NO: 34740 - DNA, 120 bp, Homo sapiens
ctgcgtagcaactggacctggacaaggacccagcgccctctggtggccgagactcctgaggctccaggccaggcctctagcgtcctggtggtttccaaggactttctttcccacagtccc

SEQ ID NO: 34741 - DNA, 120 bp, Homo sapiens
cagcgtgtcctgggatttgagctgccaagggctgggcttgggcttgccactgtagggagtgggggtgcctgcagcagcacctcgactgcccgcctcttggcctcagcttgctctaagacc

SEQ ID NO: 34742 - DNA, 120 bp, Homo sapiens
tctcgtgtgcagtgggattcctaaatctggagctcagggggaggtgtgcactgaagacagaccttcggggtcattagcacctagagggtctgtgacacctggagaatgactggcttgctg

SEQ ID NO: 34743 - DNA, 120 bp, Homo sapiens
gcccgctgcaggggtggctgcaccccgagaatggtgggggcatcttcaggagcggcatgctggtggagggtagatgggagctctgacatggccctggagtgtggggggcagtggcagcag

SEQ ID NO: 34744 - DNA, 120 bp, Homo sapiens
tgccggggtggtgggcagcaggtgtgggtggggtggggagccaaaggagctggggtgagacgggattagagatgctggctgcgggtggtggccggtggggctgttagggggagcagtgag

SEQ ID NO: 34745 - DNA, 120 bp, Homo sapiens
ccacgtgtaccacagcagcagggcatgccagacccctgagggccccagatttcagacaagtgggaaaaaggttctgatgactctctagcttatgtaccaaaattaatggaattatatact

SEQ ID NO: 34746 - DNA, 120 bp, Homo sapiens
ttacggcttacactgccaatctcttgggcatttaaattcagtgcttttatacccatcccttaggtggggaaatcaaggcctaggaagacaaggttgcccaggtcctctgtggtgctgcag

SEQ ID NO: 34747 - DNA, 120 bp, Homo sapiens
caccggatgccctcttgatccaatgtgaactaccagagccaatgacaactttgagaggcaaacgtttttctattagcagtatttttcaagttcagagttgtggggaaaggagttccagaa

SEQ ID NO: 34748 - DNA, 120 bp, Homo sapiens
tttcgctaaaggtgattccttgcttaaaacccactttcttctcatgtttttccaatgactagctgagactaaaggctcaatttaagtccaacctcctctaggctttctcctctcgtaatt

SEQ ID NO: 34749 - DNA, 120 bp, Homo sapiens
agccggcaggcagtccaatgagacactgcttgaaattactgctgcctacagagaaaggcccatctgtccacctgacctccagaatggttccaatcttaaccgcgttaagagtaaaagact

SEQ ID NO: 34750 - DNA, 120 bp, Homo sapiens
tcccgagagccaaaatggtacacaaaataaatgagattagccatcactagaagtgactttacaggataggttgtcttcctagttaaagcaagaaacacagggcctgaaaagctaattaag

SEQ ID NO: 34751 - DNA, 120 bp, Homo sapiens
tggcgcctgcccctaggtatgatgccttgtggaactgggaactttcctctgctactttcatctccactttaattgctagagggtgataagaatcccaagccctagagatgttatatttat

SEQ ID NO: 34752 - DNA, 120 bp, Homo sapiens
agtcggtcaacccagactttcaatcagctgctcccaagctgtacttttagcacctggcacagtattcctacacaaagaagagatcagtaaatgttcatccaatgaatgaaaactccaacc

SEQ ID NO: 34753 - DNA, 120 bp, Homo sapiens
gctcgaccaatagattttagtgtaaatgagtatgaagacttcactgatatgggctcaaattcaataatggaaattatttggaaaggctactgaaacattcctccctttctcacttacata

SEQ ID NO: 34754 - DNA, 120 bp, Homo sapiens
cagcgttgggaagccactgcacgtttgtaaggagtcaggttgtccacacaatggcgctattttgggattccggcttctctgcctgtgacctgctgaaaccattcatgccggcatcatgcc

SEQ ID NO: 34755 - DNA, 120 bp, Homo sapiens
aaacgagaatcgactcaatctattccactatagtttcatacaaagcatatttttttttcctcatttcaaaataatttcagacttccaaaaagttccaaaaataggacagtgtgtataccc

SEQ ID NO: 34756 - DNA, 120 bp, Homo sapiens
cagcgctgccagtcacttcgcagaaggctcctcggtttgggtctgtgtctgttgtctccttgggattacattcaggccatgcagttgggcaagagaaccagaggtgataccgtgccctca

SEQ ID NO: 34757 - DNA, 120 bp, Homo sapiens
ggacgcccccaggtcggtgcggcctgtgcggctcgctcccggcggtggctgctgggttaagggggcctctgccgttctgctgtgacatgactgtctcctcggaggtcactatgcatctca

SEQ ID NO: 34758 - DNA, 120 bp, Homo sapiens
cacgtggctccagccagcgtgctacttaaacaatcagagatggtaagagacagattcagtgtggcccttggacaaatgtgagccctggaagagcctaagcgacagccccaaaggcagaac

SEQ ID NO: 34759 - DNA, 120 bp, Homo sapiens
gaacgtggcctcactgaagtccacaccgctgagaaggcccatcatccttacggccccaaatgtccacacgaataaccccgaacacacctgtgtggccggaaaggcacaacggatttttgc

SEQ ID NO: 34760 - DNA, 120 bp, Homo sapiens
gggcgaattgtcaacctgtcttcagcacagacacagctgtctgaagaccgaaatgcttagtgagctaatcatggcctcgaaaagcaaaaataaaagctcccactaccatcatataattat

SEQ ID NO: 34761 - DNA, 120 bp, Homo sapiens
taacgctatcgctcaagaagaggttcccaagattgtgaaacagcttttggtacaatttcatctgataagcctccatttcaagggcaaacaattccacagtcctgaaaaacacaagctgaa

SEQ ID NO: 34762 - DNA, 120 bp, Homo sapiens
taacgcttagctgtactcacctctccatcctgcattctaaatattcttttgattcctttctgcacaaagcattttcaaaattattgttatgaagacacttcatgaatttctctttaaagc

SEQ ID NO: 34763 - DNA, 120 bp, Homo sapiens
gaacgagaaagaaaacagcatgttcttttcagagtgaaaagtgatgcaaccacacaacagccttaagagctgcgctgcttttcctttcaaaacttgtttcctcaggccgggcgcagtggt

SEQ ID NO: 34764 - DNA, 120 bp, Homo sapiens
ggacgccgaccccggcccctgtacccccccgcctctaggtctccagggaaggaccctcctggggtgggcaggctgctcttggccccagatctgcttctgggtctgaggctggccctcagc

SEQ ID NO: 34765 - DNA, 120 bp, Homo sapiens
agccgtgctgcacgtgcctcccattaccatcctaagtcaaggcaaaacaaaaccacacagtccccgagccatctgcaaacctcccgcagcaagctcggagggtgaggcccccccacagta

SEQ ID NO: 34766 - DNA, 120 bp, Homo sapiens
gctcggagggtgaggccatctgagtgccgggctggccgggcttaggaggagaccaagctttacccacggagacgccgtttaatggaacccaagtgacccaagggagctgccacgccaccg

SEQ ID NO: 34767 - DNA, 120 bp, Homo sapiens
gtgcgggggtcctggttcagatgtcctgaagctcctccctcggagtgggcagcccccattaggaaacttctggaacccagaggctggaagccggcctcactctgggacctgggccctccc

SEQ ID NO: 34768 - DNA, 120 bp, Homo sapiens
ccccgtgattgctggggctccctcagagcgggggtcttcttcccaccttggatgctgagggggaaggaggtaagacactggagggctgggtgggctcaccaggcttcagagggcagtggg

SEQ ID NO: 34769 - DNA, 120 bp, Homo sapiens
tagcgcccagctgtctctccgggcaggtctcacaaatgccccgaggcaggcccatcgctggccaaattccccacccctcctgcctggactcagtcccttgtgaaatctaagcaaagtcct

SEQ ID NO: 34770 - DNA, 120 bp, Homo sapiens
catcgggtagctcctgctgcataacaagcgggggagggggtggcccatggctctggactgctgggccacaggggtgatgaggtgaggcttggaggagtctgtaggatcctaactttgatg

SEQ ID NO: 34771 - DNA, 120 bp, Homo sapiens
tatcgcctgtgaaacccacgcagccagcaggggtacgagtgcttctgaggtcccagtgggcggggggtggcctgacccagacagggcagggggacggcagctggagcgcgtggagagagc

SEQ ID NO: 34772 - DNA, 120 bp, Homo sapiens
gagcgcccgttccctgggagccactggagggcgcatggcacacggcgcccggccagggcctgactgtgactggagcaagagccgagggactggacggacggcaggtggcgccacctgatc

SEQ ID NO: 34773 - DNA, 120 bp, Homo sapiens
cagcgctccagggagaggagtggggagcggacagcgccggcccgggctggaaggtcagcttgaggctctgggatgtgaacactgggcaccgagtcatccagaaataaatcccaggcacgg

SEQ ID NO: 34774 - DNA, 120 bp, Homo sapiens
aatcgcctgagcccaggggggtggaggtggcagcgagcagagctcatgccaccgcactccagcctggacgacagagcgggaccctgtctctaaaaagatgccactctcttgggggcttgg

SEQ ID NO: 34775 - DNA, 120 bp, Homo sapiens
cagcggccgaacctgtgtcactcttggtggagtgagcagacggcacttggtgtgagctgtttctcagacatcaatcctgcaagaaactgctcagaggccgcttcctcagagggctgggtg

SEQ ID NO: 34776 - DNA, 120 bp, Homo sapiens
ggccgccggccacggcagcgatccggccacggcagcgttccggttggtgtcaccctgtcccggcctgagcccagctctcagatccgagcaccaattctgtctacagccccttcctgcctg

SEQ ID NO: 34777 - DNA, 120 bp, Homo sapiens
ctgcgggccctccctgccctgcagggacggtgcagtgagcacaggtgtgcaggctgtgcggtgagagccccagggctgggaggagcaggcagccttggtccagcaggtcctgtgtggggg

SEQ ID NO: 34778 - DNA, 120 bp, Homo sapiens
gggcggggccaggactaacccagagggccagagggactgaagctgcggcctgtgggcccctaatgcccagccctcgtggaggcaccaaggcaggagcgcatcccaacacccagcccgggc

SEQ ID NO: 34779 - DNA, 120 bp, Homo sapiens
cctcggtgggcagctcctcacccacggtgaagcgaggccaaaggtcatcgagtgctgaccgccactctccttcctccaggggcccctctgtgagcaatgcccatgtgacactgatgtcac

SEQ ID NO: 34780 - DNA, 120 bp, Homo sapiens
agacggaaatactcctgacgcccctcagtgaccctggaccggcgtctgtctgggcaggaccatctagtgtctgaggtgtcacatgaggatcccagacaaaacacgctccccctccggtgt

SEQ ID NO: 34781 - DNA, 120 bp, Homo sapiens
cagcgcacaggagcacacagcagcacacagcagcgcccacccacgcaccctggtcctctgctgtgcatgtcattgagggtgtggggtctgcggagagcccggaccactcggaagccttgg

SEQ ID NO: 34782 - DNA, 120 bp, Homo sapiens
ccacgcgggcccagagcacctcaggctgtgggcattgggcctctgcctctggccccaggctcaggctccctggggaagtggtggccgtgctgcatcaaagaatggcagagaaaggaccca

SEQ ID NO: 34783 - DNA, 120 bp, Homo sapiens
ctgcggggagggacgccaccagcccagcctgccgtgccctgctgtgcgggtgaaggggctgcagggaaggacaccaccagcctggcctgccgtgccctgctgtgtgggtgaaggggtcac

SEQ ID NO: 34784 - DNA, 120 bp, Homo sapiens
ccccgtccagtagccatgcaggggatggtgtgcatgaggcaggcgctgctgtcctacgatgtcagccgggtgacggggccagggctccagtgtcgctgccatcgggcccttggggagcat

SEQ ID NO: 34785 - DNA, 120 bp, Homo sapiens
ggacgctcggctctcgtctcaggaatcccagggcagaagtccagcgaggcggcaggtggccggcccgtccccagcctctcttcccactgaggagagatccaagggccggcggagtggtgg

SEQ ID NO: 34786 - DNA, 120 bp, Homo sapiens
ctgcgggaacacgggcaccaggcccagcagtgcatggatgcggcaggccccgcgtgcgatgccctggtccccacgactgtttcttcccacgccgcggagtgcattccctcatgctcccgt

SEQ ID NO: 34787 - DNA, 120 bp, Homo sapiens
acacgcgctgcagcctctgccctcctggggctccctgagagagggggcaccccttgctcccatcacagtcctcctgcagcctggggccccgcccagcacgcccaccaaaggggaggcccg

SEQ ID NO: 34788 - DNA, 120 bp, Homo sapiens
tggcggtgggtgacgaggtgcacaagtcaggtcagggagggggactctgccctggcaccactggggcacaggacactggctcaggtgtcagctgaggaccccccagtgtaggcgaggggc

SEQ ID NO: 34789 - DNA, 120 bp, Homo sapiens
agccgctgaggcctgtggacacagctccgtgtattctgaggtcgcagagcacaagaggttgggggtgtgatacggaccgacctcgcccatccaggaggaatggggctggtaacagagctt

SEQ ID NO: 34790 - DNA, 120 bp, Homo sapiens
caccggtagaggttgcgtggctccccagtggagctgagggctggcgtttcttgctctgtatttccctgcgctctggaaactcctgcatcaccagccttgggcccttcactgcctcccctg

SEQ ID NO: 34791 - DNA, 120 bp, Homo sapiens
ggacgctgcctgggacggagggctcccttctgcctccggccaggtgggccccgcagcagctcaagcttcagctgcagtggagggaagagtgaactgctgggcagaagcagaagcaggcct

SEQ ID NO: 34792 - DNA, 120 bp, Homo sapiens
actcgtgaccccagatcccagaggccctgcccccttgccacctcccagaatgttggcagggcctctgggtgattttcatccacatgcaggggtgtcacataggcccctcggctccagctc

SEQ ID NO: 34793 - DNA, 120 bp, Homo sapiens
gaacggcagctttgtatccacaggtagggctgggcggctccaatttgaacttaggcatatggacgctgtctaacgattcacgacactcctcgtttctttcgctactattggaccagttga

SEQ ID NO: 34794 - DNA, 120 bp, Homo sapiens
cctcgcagagccagcgctccagctgctgggcgcgcaacagctgtcccgggaggcaagggttcgcacggcagtgcttctgtgtcgacagaggctgtgctgcagctccctgccaggcccgtg

SEQ ID NO: 34795 - DNA, 120 bp, Homo sapiens
caccgctaactagcagtcggaggcggcgttgtttctaagacaggcaggcagctccggcaggagcagccgctaagcacaaggacggccaaccacacaaagcctgcttctcaaccactcgca

SEQ ID NO: 34796 - DNA, 120 bp, Homo sapiens
aatcggctcacagttgctccccattcttcaatgctgatcctgccactttactgaaaatcacattattaacgtttaaaaaacgtatgggaaccatgcaaagacatccacgcccctcagttg

SEQ ID NO: 34797 - DNA, 120 bp, Homo sapiens
tgccgctccagcacctggctccgaagtctgtgcagaaggcgaggctcccgtagtgctcgagagggccttgcacgctccccgtggagggaacaaagctacgtggattttccagcgcgccgc

SEQ ID NO: 34798 - DNA, 120 bp, Homo sapiens
gctcgcgtgacaggtgtgctctgtgctgtcaggaaactgcagggctttgagtataaactgaaaacagcaaaactatgttctcatctcagaggccccttccttctcaccccgaggtcacct

SEQ ID NO: 34799 - DNA, 120 bp, Homo sapiens
gtgcggacaggcttaacccagcaaagactggcggaggggtgtggagacagtggtcaggggtgggttcccgggggtactgatgcccaaaataaaatgtcaaggacgagccagtgtttgctg

SEQ ID NO: 34800 - DNA, 120 bp, Homo sapiens
gaacgaggggaagcgagaaagggtgttctaggcaagggatcaacatccgcaaaagacagtgtgaaagagagcacccggaaacttcgtggggatcaccgggcgtgggacttgccggcccca

SEQ ID NO: 34801 - DNA, 120 bp, Homo sapiens
tcccgactaacagggacagcaacatcaaaagcgatggcttttgtgaaactaattcagccaccttggagcagaggattcctctgctggtttctgtttctgccagctctgtgcagtgcaggc

SEQ ID NO: 34802 - DNA, 120 bp, Homo sapiens
aggcgctatgatgctctctctctctcacacacacatacagggacccgggtgcctctcaggttgagaggggtggtcaccatccccacactcaggccccctctgtctccaggcctgctgctt

SEQ ID NO: 34803 - DNA, 120 bp, Homo sapiens
ccccgggtttcagccaagttcacctcactgctcacagacattcattattaacagactgtttgatagcactttgggctctttttaaataagacataggaagaaagatgccaacgtctcact

SEQ ID NO: 34804 - DNA, 120 bp, Homo sapiens
tgacggggtcctgtcgcccctgtccacaccctgctatggccatggtctccacagccgcacatgggctccagacattttcacgagttatgaaccaaagagaaccaagacccctggagcagg

SEQ ID NO: 34805 - DNA, 120 bp, Homo sapiens
catcgggaaattcattgtgttggtatcaaagccccaactcagaacataaaaaccataaaactgcaaagcctctgcagtctgagcgtgcgctccccaggcctccgctgtctgagcgtgcgc

SEQ ID NO: 34806 - DNA, 120 bp, Homo sapiens
ctccgcggtctgaccctgtgctacccatgcaagcgccacccacaggtgcgtcctgggggctgcctcctcctccacgttggccagcagtgtggggtgtgacggggcccatgttgttgtcac

SEQ ID NO: 34807 - DNA, 120 bp, Homo sapiens
ccacgtttcccctgcacacgtgtccgttcacaaagattctgagcaaaaggtcacagaacagcttcctctgccctttatatgtggggaggaggccaaagatctgcaggcgtcatcattcca

SEQ ID NO: 34808 - DNA, 120 bp, Homo sapiens
tgccggcaccctcttgtgcttcacatgggttggtttacttaaccctcctgtctcatgaagatttttactaagcctggggaaaccgaggcacacagcaaggatgtcacctgcctgcaaagg

SEQ ID NO: 34809 - DNA, 120 bp, Homo sapiens
gcccgctccagagcccaggcccttaaccacttccttcctaggaagacggagggcgagggagtttcttacagcgctttatgtcaactcctgctgctgcccaccactaatccaggcccctgc

SEQ ID NO: 34810 - DNA, 120 bp, Homo sapiens
gcacggtccttcctattagcaggcttactacgaagccctgtctaacattccctcatgtcaggtagaaggaattagaccagaggtcaaggcagcggctggaatcagtggtgctttctcaaa

SEQ ID NO: 34811 - DNA, 120 bp, Homo sapiens
tttcggtcaaattttgggcaccactgtactgggttctatgacagagaagccaccaaggtcccgtgcgaggagccctgggcagggacagctgaagctgtgcacctgggccctcctgattgc

SEQ ID NO: 34812 - DNA, 120 bp, Homo sapiens
tgtcggcccccaaagctcaggacacacgggccctcccaggtctctctggcgggctaggccttggcagggccccctcagcgggccccactctgaaccgcaagcacagggtcttctgcagtg

SEQ ID NO: 34813 - DNA, 120 bp, Homo sapiens
ctacgggctcagggctgtgcagggacacaggggccagcaccactgggcaccctgtcctttcccagcctgcctgtgcaccctgtgggcagtgactcctcaggcacagtggcccaaagtcac

SEQ ID NO: 34814 - DNA, 120 bp, Homo sapiens
agccgtccacctgcggcgggcacatccatggacttccaagccaacagggacagctgcccagacgggctgcccaagccaaccaaggatcctgtcccatcggtccctgtggcttgggagtct

SEQ ID NO: 34815 - DNA, 120 bp, Homo sapiens
tttcgtttctcaagctgccccagcttctccaagtcctgagcctggggctcccagctccgagcggatgctctgcaagtggcgtccctgcaccctggtgcaggcggacggacgcgggagagc

SEQ ID NO: 34816 - DNA, 120 bp, Homo sapiens
tcccgggcttggaacgccgcagcctaggaagcatcttcccaggaaatcgcagtcggagcccagcacggggtcttggaagaaaagaccccaccttctatcctcacgagtacgcattaggag

SEQ ID NO: 34817 - DNA, 120 bp, Homo sapiens
caccgctcagtagatgacacagaggcacagctgaggacccagagacgggcacaccggaaacagcgacatccacaggcgctcggcagggaccaggaacccagaaggcttgacgcgcagggg

SEQ ID NO: 34818 - DNA, 120 bp, Homo sapiens
tctcggagaaactctacccctgtccttcccagcctcctgcttagctgggcctcaccctagcctgctggagatggcggccatgccgtcagagagggggatggacagattggctgaggtcac

SEQ ID NO: 34819 - DNA, 120 bp, Homo sapiens
ccgtccaaccaactcaggacgaccacccaggcctcgcagcagcccgtgaagagtgggctctgagaatgtggggcacaccaggctccctctctggtccccaaccccagccgctgaaataag

SEQ ID NO: 34820 - DNA, 120 bp, Homo sapiens
ccccggtcacgacccgagacggccatttttcaacgctcaacttcactttcacagaaatgcaccaaaggcagcctcgctctgtggtctgcagcgattactgcaccaggagaaggcacccct

SEQ ID NO: 34821 - DNA, 120 bp, Homo sapiens
ggacgggacgcgagctgaccacctgttccttctttccgcagggtcgcggagcctcgccggccgccatgtggagctgcagctggttcaacggcacagggctggtggaggagctgcctgcct

SEQ ID NO: 34822 - DNA, 120 bp, Homo sapiens
tgtcgctgctgggcctggtggtgggcgtgccagtgggcctgtgctacaacgccctgctggtgctggccaacctacacagcaaggccagcatgaccatgccggacgtgtactttgtcaaca

SEQ ID NO: 34823 - DNA, 120 bp, Homo sapiens
cagcgccctggcccctgtgcacctgctcggccccccgagctcccggtgggcgctgtggagtgtgggcggcgaagtccacgtggcactgcagatccccttcaatgtgtcctcactggtggc

SEQ ID NO: 34824 - DNA, 120 bp, Homo sapiens
caccgccctgctgagcctcgaccactacatcgagcgtgcactgccgcggacctacatggccagcgtgtacaacacgcggcacgtgtgcggcttcgtgtggggtggcgcgctgctgaccag

SEQ ID NO: 34825 - DNA, 120 bp, Homo sapiens
cctcgctgctcttctacatctgcagccatgtgtccacccgcgcgctagagtgcgccaagatgcagaacgcagaagctgccgacgccacgctggtgttcatcggctacgtggtgccagcac

SEQ ID NO: 34826 - DNA, 120 bp, Homo sapiens
ctacgcgctggtgctactctcccgcgtccgcagggaggacacgcccctggaccgggacacgggccggctggagccctcggcacacaggctgctggtggccaccgtgtgcacgcagtttgg

SEQ ID NO: 34827 - DNA, 120 bp, Homo sapiens
ggacgccacactatctgatcctgctggggcacacggtcatcatctcgcgagggaagcccgtggacgcacactacctggggctactgcactttgtgaaggatttctccaaactcctggcct

SEQ ID NO: 34828 - DNA, 120 bp, Homo sapiens
taccgctacatgaaccagagcttccccagcaagctccaacggctgatgaaaaagctgccctgcggggaccggcactgctccccggaccacatgggggtgcagcaggtgctggcgtaggcg

SEQ ID NO: 34829 - DNA, 120 bp, Homo sapiens
agacgtgactctggtggacgcagagcacttagttaccctggacgctccccacatccttccagaaggagacgagctgctggaagagaagcaggaggggtgtttttcttgaagtttcctttt

SEQ ID NO: 34830 - DNA, 120 bp, Homo sapiens
ccccgtggctggcatctggcttgagtctccccgaggcctgtgcgtctcccaaacacgcagctcaaggtccacatccgcaaaagcctcctcgccttcagcctcctcagcattcagtttgtc

SEQ ID NO: 34831 - DNA, 120 bp, Homo sapiens
ctacgaaagaatggcaacagccagggtggccgggccctgccagtgggcggcgtgtgctagcaaggcctgccgggtgtgccgcagtcaccacagggttctgagaacatttcacagaagtgc

SEQ ID NO: 34832 - DNA, 120 bp, Homo sapiens
agacgcggagacatggctggtgttaaatggagctattcaatagcagtgacgcgctctcctcagccaccaaatgtccctgacaccctccccagcccccacagataacatcagctgaggttt

SEQ ID NO: 34833 - DNA, 120 bp, Homo sapiens
acacggggtctggtgggagggccagggtggaaccttaggccagctccgaaggcacctgggaccagcatccgtatctccgcggccctcgcagcctcagatggggcccggaccggcctgttc

SEQ ID NO: 34834 - DNA, 120 bp, Homo sapiens
gtccgtgcttgaaccaggagaccctcttcctggccgatactttccagccccccttggctccacgctgagctcccaggaaaggggcggaccccacacacaggtgagggtggcactgggctg

SEQ ID NO: 34835 - DNA, 120 bp, Homo sapiens
gcccgggaattacaccatccaactatcctccccaaaggcaggaggggcctaaaatcactatttcaatttctcagtggctttgggtgcaaactggctcatttctgtgggtctgttgcaggg

SEQ ID NO: 34836 - DNA, 120 bp, Homo sapiens
cagcgcagaccctcgcctgctacctgagacacttcactgtgcaccatggcctgccccaaccccctacccagcgagtcccctcctcatccccaggttcccgccagcctctgctgcctgaga

SEQ ID NO: 34837 - DNA, 120 bp, Homo sapiens
gagcgccaaggcctccgtcctcatccccaggctcccgccagtctctgtggctgcttcccaggagctgcgtcgctgactgttcctgagacacctgctcatctatattctatgttgccttca

SEQ ID NO: 34838 - DNA, 120 bp, Homo sapiens
acgcgggctgaaggagcaggcctgccccacacaggcgttactcctcccagaaaaataagaataaagtcaccattgactacacccctgagggcttctgtggccctgaggatggaactgagg

SEQ ID NO: 34839 - DNA, 120 bp, Homo sapiens
ttccggcagaagtgagagcacacgttcctgcctccgccctgctgcacagggcagcctggcaagagctgtatggcggtgcgcacggtccgcactccgtcaggttgggaagtgaaggaagag

SEQ ID NO: 34840 - DNA, 120 bp, Homo sapiens
ggccggggacggtgccgggcagtgccgctgggagacgggcttggtgcctaggccgggtgggggtgagctaagcacacccagccccgctccaccagactgaccttgccaggctgggatttg

SEQ ID NO: 34841 - DNA, 120 bp, Homo sapiens
cttcggggataactgtgaggaccccctctcctaagacccccaagtcagggggccatgaaaggtgggggaaggggaacctgtctgggaccactcagaattcttccctttccttgtagagcc

SEQ ID NO: 34842 - DNA, 120 bp, Homo sapiens
gcccgagcccgggcagaagaaccagaacaaaacctaagtacaaacacggcgggctcgagcggggcttggcacggcgcaggggtggcggcaagggggcagcctggactggagccagaaagc

SEQ ID NO: 34843 - DNA, 120 bp, Homo sapiens
atccgccacgcggacggggaagctgagacccagggctcaggtcacgcttacgtcgtttggtagccaggtaccaggacctcatgccatacacagcacacaggctgtggagctggagccagt

SEQ ID NO: 34844 - DNA, 120 bp, Homo sapiens
agtcgaggaacctggaagccccgacccagacaaggcgcagcctgggggagggacagggaggcctctcgaacccatggctttcttctgcccactgcagcctgggggagggacagggaggcc

SEQ ID NO: 34845 - DNA, 120 bp, Homo sapiens
tctcgaacccatggctttcttctgcctgcacaggggcccctcctgtccacgataaaagcccagtaataaggagaaagcagtcagcagccttcacctcagctccagactccgttctcgggg

SEQ ID NO: 34846 - DNA, 120 bp, Homo sapiens
gaccgcacgggagagcagggcggaccccgcgaacggggacagcacctgacggcgacatccacaaacgccgccccgcaggagcacgcactcccacacaaagcgcctgcagctgacagccgc

SEQ ID NO: 34847 - DNA, 120 bp, Homo sapiens
cgccgggaggggacatctggacagcctcacgcagctttcagacctgcagtccatgttaaaaggatcttgtttccaatttgccttaattaaacaaacattccaaaccacttcctctcagtc

SEQ ID NO: 34848 - DNA, 120 bp, Homo sapiens
actcggagtcctgggaaccactcatcactgtcgggtgcaggtggacgtcccctcacggtaaggtcagagtgctcccgcccagcgcgtggctccgcggcgccctgtgtgcctggggggtga

SEQ ID NO: 34849 - DNA, 120 bp, Homo sapiens
tggcgggggcgaggtgcttgtgaggcacatcacaatggggcccgagggcgctgcgtgcacaggactctacagcacagtcttcatgggccgttggtctgagttactcagagcaggggatga

SEQ ID NO: 34850 - DNA, 120 bp, Homo sapiens
ggacgggctcacaggaggaggggccagcatgggccacgcaccacactctcacccaagacccaaagccggccaggccaccgatgggcagagatgactgcagcttccagaatagtgggcttc

SEQ ID NO: 34851 - DNA, 120 bp, Homo sapiens
tctcgtaaccctctggacacagagaacgcagagaacaggcagtgttccatgttcccaccaaggggaagatccagcgcccgcagagaactaaggaagcaccggggagtgtggtgctactga

SEQ ID NO: 34852 - DNA, 120 bp, Homo sapiens
atgcgtcatttgcatttatccaaagaaagggttcacgatgtcttacgttcaaacagataaaatcagactgaggtggggtgggaggagcctccccgaggctccttgaggaactgcctggca

SEQ ID NO: 34853 - DNA, 120 bp, Homo sapiens
gaccgaggtggggctgggacaatgcccaggtgctggcctctcctcggatattccgccatgtgctcctgggggcggagggtcccccaagggcagagctcagccagcaccaccctgcccact

SEQ ID NO: 34854 - DNA, 120 bp, Homo sapiens
gcacgacgctcccagagaacccaaggatgcgcccagaatgctcccagcaaccactgagggggccctgctgggagacccgcaaaactgccaatgccttgtaggccagcagccgcacgcgcc

SEQ ID NO: 34855 - DNA, 120 bp, Homo sapiens
tcacgcccaggggctgacgggccagatggtctctgagtgcagcaaattccgtcttgtgagggaaagtgatagaagatgagagtgtgggccgggcgcggtggctcaagcctgtaatcccag

SEQ ID NO: 34856 - DNA, 120 bp, Homo sapiens
acacgagagtgtggaggcgcagacgacgggagcacctgagcttccgtgctcagcatgctgtggtcaactgtggtctgcacacacccaccgttaactgggccctccagctgcagacaccaa

SEQ ID NO: 34857 - DNA, 120 bp, Homo sapiens
ggacggcggcaccgacgcgcccacgtccaccagtgccaggcgacacagcagaaaaccaggatgccctgcccctcaccgcactgtttccgggctcggcaggcacacaccctgaatgaaagg

SEQ ID NO: 34858 - DNA, 120 bp, Homo sapiens
tggcgcggagccacggcctgcgtgcttctgaaggaacaagagagacgaagtcactgtgggccgcaccacgtcctgacagcagctaacctccccaggccggaatggaacagatggaagaca

SEQ ID NO: 34859 - DNA, 120 bp, Homo sapiens
gcacggaatgcagaaattggagcagagttccaaccccgcctgccactggtgcggcaaaacccgcacaccccacacacagcttccttgggacctgggctctttctataaaggggctgctgg

SEQ ID NO: 34860 - DNA, 120 bp, Homo sapiens
gatcggatgcccgagggtgctcctgcatgtcacgcggaggcgggggacgccagcgatgccctcccgggggcgtgggaaggggctctcggcctcccttgactctccatcatcagagaatgt

SEQ ID NO: 34861 - DNA, 120 bp, Homo sapiens
gtccgcctggcatgtgagacacggcgcacttctccgaacctcgggctgtcttccagcatgtgttagctctagaattccttctgcacacagcttgatgtctcccctgtaaggtggatccgg

SEQ ID NO: 34862 - DNA, 120 bp, Homo sapiens
cggcgcgtggtactgtgagcacctccaaccaactgctccctcccttgtgcctatgggggagaagcgaatgagccaggactgggctaatctcaggcagtgccgccccacccttgcccctgg

SEQ ID NO: 34863 - DNA, 120 bp, Homo sapiens
gaccgctccccttgaaaaggagcagcagttggtgggaagggaagcctcactccgcccagcagagacaaggggtgtgtgggatctcacagaaccgtgtagacccacgcacccccactgtac

SEQ ID NO: 34864 - DNA, 120 bp, Homo sapiens
agacgttgcccggtatcacacagcacgtggggtgaggaagtggaacccgggctggagccggcaacgctgaaaaccagggttgtttggacggcgacatgcaactccctgagggctctgctc

SEQ ID NO: 34865 - DNA, 120 bp, Homo sapiens
ctgcgttttacctgaaatctttggtccactcatatttaaataagtattgacatggttatgtctgggtctgtaattttatgcctcgctctctatacataccctccagttcccccctttgtt

SEQ ID NO: 34866 - DNA, 120 bp, Homo sapiens
ttacgtgaatatttactgattgatttttctcctcattatattttgtgaatatacgtgaatatttattgattgatctttctccttattaagctttttcagcatggtatcacctcagtagta

SEQ ID NO: 34867 - DNA, 120 bp, Homo sapiens
cgagcttctcctacctctatccatccttccttcagcccatttcccccgacttctgccaccacctccgggacgtcctgaaggcgaaccggcctcccacctgctaagtccaacagacacttc

SEQ ID NO: 34868 - DNA, 120 bp, Homo sapiens
tggcgggttgccctcctacctcttgacaacacgctcttcctcggctgcagagacacctcctctccgtattttcctcccacattagcaatgaccacactcaggctatgtcactcatggtat

SEQ ID NO: 34869 - DNA, 120 bp, Homo sapiens
caacgctactctgatctgagcccctgtggcctcgggatccccaggcgtctgttcccgagaacgcggggcagaaagcctagtcctgcacgcagtaccaacaatgcggagtcagcgggttgt

SEQ ID NO: 34870 - DNA, 120 bp, Homo sapiens
tttcgactttgttctgtttcctgaggggttctgaataagggccacccccttcctcctctgtgccgccatgttccctcccggccacgcccccttgcaacccctccaatctccgccctgcac

SEQ ID NO: 34871 - DNA, 120 bp, Homo sapiens
tggcggcagcagcgggtcttcgtggagtcagcccctccgctgcttggccgctgggtttgtcccttattttaatggatgcgcgttggctaggactgcaacattgtttctttcttccacaaa

SEQ ID NO: 34872 - DNA, 120 bp, Homo sapiens
caacgtggccatgtcagcagcgtcgctggcaccatctggcccggctgcccggtgttggaggggtttaaacattgttactgacccgcattggttgtaactctgttcttcattcagagacga

SEQ ID NO: 34873 - DNA, 120 bp, Homo sapiens
catcgaccagggttgtaaaatgagtacagaaatccttgtaatgtgagaggattacggttgcccataaatatttatggggtaacagcagcttctcagatgtgtcatacacaagacatctgc

SEQ ID NO: 34874 - DNA, 120 bp, Homo sapiens
ctccgcccaggcacctcactctgtttttgttttagatctgagcctttgaggccagggctggctggacaaatgcccccaaaacagcacgtgtgcactcctccattggcagccaaccgggct

SEQ ID NO: 34875 - DNA, 120 bp, Homo sapiens
gagcggggtttctttctgcccctcctgggctgtgtgaggggctccgtatttattctggcaagcctcacaagtggtgttgccgcgaatttctggtagcgtctgggctcagctgtgctgggt

SEQ ID NO: 34876 - DNA, 120 bp, Homo sapiens
tgccggagttcatttaaaaccatgattggtgacaccaggaagagaacagcaccagagcacaagtcctcagctgcgcattttggtttaagaaaatagatgacctccagggacaccaagcag

SEQ ID NO: 34877 - DNA, 120 bp, Homo sapiens
cagcgacttcattttaaatagaaccacccacagattctggtgttacctgaaaatctaaaagatgtaattatgagtgttcatagcattagttgacaagggtctgaaaatactgaagatagc

SEQ ID NO: 34878 - DNA, 120 bp, Homo sapiens
ggccgtgggcaggggcgctggggccacctcctgccagctgggacccatccgtgggagctgactatccgcagctctgcccggctccgtgctcggccaccccagttcggcagctggacatcg

SEQ ID NO: 34879 - DNA, 120 bp, Homo sapiens
ccacggaacctggcaaacgcagcatcccagggctttatttcctgagagcgtttaccagcagcaagcaacacgccaaagccttattttgcttccggcaaacttgcctagtggctcatctac

SEQ ID NO: 34880 - DNA, 120 bp, Homo sapiens
aggcgcaggggtgcccggagcctgcagccatcgcagagggcaaggtggctgagttgaagctgttcctgcccctgccagacagcagggagacccctgggcccctccacgcgcctcccaccc

SEQ ID NO: 34881 - DNA, 120 bp, Homo sapiens
acccggggctggccaggggcacccgtctcgcccactgccccagacaggtgcgcggccgccctgcccactcgcgggcccgcgggccctgccggcccataaatcagccgctaatccttcccc

SEQ ID NO: 34882 - DNA, 120 bp, Homo sapiens
ctccgccggcctctcgtggggcgtgatggatgggttcccggcctcgccgactgctgtgaaatcactcagcagccaggcaagcccctaaatctgacgcacagagtgttgaaaggaaggatg

SEQ ID NO: 34883 - DNA, 120 bp, Homo sapiens
cctcgggccgcacaatcggcctctgtggccccggcccgtgcagatttaattaggccccggcttcccctgccggccgcgctcgcccgtggacggaaggcccctgttttcttaaactcccag

SEQ ID NO: 34884 - DNA, 120 bp, Homo sapiens
gcccgccataaatatcggcctcgcgcagctgagctgaaacagaggctttttgtctgcgtggccgccctccgctggcctctcggctgggcctggcagggagggcccccagcgccaggcggt

SEQ ID NO: 34885 - DNA, 120 bp, Homo sapiens
gggcggcaggggcccggcggggtctctgggcttgtgagtgctgggggtgagtccctgggtgtcctggctgcggtgagccccggctggggtcccccaaatgctccccagtaccagaggcgt

SEQ ID NO: 34886 - DNA, 120 bp, Homo sapiens
cagcgtggagcggccgacgggccagtgctgcccagtggttcttgtgccctggaccccaacggcggcatcctggggcggcaggtaccccgtccggtagcgcgaagccgagtcgtcagggcc

SEQ ID NO: 34887 - DNA, 120 bp, Homo sapiens
gcccgtccagtgccctggggccaggtcctgggctaagcaccttcctgtgacccgctcagaggaacccctggcagtggggatggcgtcacccccatttgagagatgaggagactgaggctc

SEQ ID NO: 34888 - DNA, 120 bp, Homo sapiens
ggacgcggcttgcccgagtcacactgattgagaggggcagacctggattcgtctgcagcccaagctcttagagaccccggtgtggcctgccgggcagccagcttgtccacagcctcactc

SEQ ID NO: 34889 - DNA, 120 bp, Homo sapiens
tggcgatgattcagtttcagccctgcacctgcagcctctggttgcagccggtctgcagtgtttctctttgttcccccttccatcttcctcccaccttatgttcccatgcttcccagcagg

SEQ ID NO: 34890 - DNA, 120 bp, Homo sapiens
gagcggaggcccaatttgcgtttccttttctgtaataaagcctgctgatgggtgattgcagctttctctcactgccagggaggaactggggtaggctccaggcagccagaggcaccactg

SEQ ID NO: 34891 - DNA, 120 bp, Homo sapiens
ttccgtgggtttccccggggcaccttcaagttccagtgtgagtgctgttgagattccgggcgtccagtgcacacacgggagacggccattgcctcccctccagccccagccgcggtgcac

SEQ ID NO: 34892 - DNA, 120 bp, Homo sapiens
gggcgaaggctgtctgggtgaaggctatttgtgagtgaggccggggaatgaggggcagttggctgctgctctggaggcctgggcggccttggtgtctgggagcctcggccaggacactgg

SEQ ID NO: 34893 - DNA, 120 bp, Homo sapiens
ggccggtggggccctcgtggccctagctgaccttgacttactgcagctggagcgaagtctcccacaggtcctccatcctgcagggattcgggcatgactaggggtcaggtgaatctgatg

SEQ ID NO: 34894 - DNA, 120 bp, Homo sapiens
gagcgcccagcactgtccatgaggagggggattctgagcactcactgtggctgtgcccccgactcagctgcagcctggagggagtgtccagccccagggaaggcagaaagcccttgacaa

SEQ ID NO: 34895 - DNA, 120 bp, Homo sapiens
ctccgcacgtctcaggcatggcctgcacgggtctcctcgcaggtgcccccacaccccaccgtgcacgcctggccatctcctagagaaaggcctcccaggctgctcaggagtggccaggct

SEQ ID NO: 34896 - DNA, 120 bp, Homo sapiens
actcgtgcgtggaaggccaggcgtgtgacacgtgtgagcatagcgtgggcaggacgcacgtgagggcagtggcggcttcaagcacaaatcctagggactgggtgggtccttggagcagca

SEQ ID NO: 34897 - DNA, 120 bp, Homo sapiens
acccgcacagatgcaggttctcctcagttgtctagtggaggacttcagattggaaagaaactctcagcctggcagcctcacagtactgaggaggccacaggcccaggaagggcctcacta

SEQ ID NO: 34898 - DNA, 120 bp, Homo sapiens
ccacgctgccggctcctggtgacctgcgtcccagtacctggtctggtttcttttcccagactttggaaggtccccgttgtctgcagggggtcccagccctgccaggggaaaccccccaaa

SEQ ID NO: 34899 - DNA, 120 bp, Homo sapiens
atacgagctgcaagagggcagggtcgaagcctgtcttgttacagggcccgtggtggagctgtacaagtcacaccctgccgaggggagcactctgctcaccagccgcctggaggggcacac

SEQ ID NO: 34900 - DNA, 120 bp, Homo sapiens
acacgtttcccaccccattcacccaggggagacctttttccgttgcgtgcagaggttctgtgtgagctggaggcggccacgggccagtcacacggatggtggctccggctggtgcccatc

SEQ ID NO: 34901 - DNA, 120 bp, Homo sapiens
agacggactgtctgtgagacattctcacaggtgctctgggatacacgccatggctgtacctggcctcaagtggctcatcgtgcttcaggggatacaaaatggatacacagataactctaa

SEQ ID NO: 34902 - DNA, 120 bp, Homo sapiens
gaacgaggagcggggaggaggaggccgggtgggaggcgatgggagctgtgggagggttctgggaggggaggtgcacactcaggcgtgcgggcagagggcagccccacctgaagcagctcc

SEQ ID NO: 34903 - DNA, 120 bp, Homo sapiens
ctccggtggtaaagcctcccgtcggccaggtgccgctgtaccaggtgcacgtgcttgccgcagaccccgcaggtgctgctgaccaagctgcccgccaatgcctggtcctggggaagatgc

SEQ ID NO: 34904 - DNA, 120 bp, Homo sapiens
agccgtccacccagccctccctcctggtggcagcccacaggtggccggaagagcccatcttacagatggagaactggccaggagaggagccgccagcagggctgcggtcggggtcacacc

SEQ ID NO: 34905 - DNA, 120 bp, Homo sapiens
caacgagccccctctgccaaccactggggcgtcacaggcccaagggtggccggcatggcctgtcagggtgtggacatggctgtctggggcatgtgcccagatggatgaggggctcgaggt

SEQ ID NO: 34906 - DNA, 120 bp, Homo sapiens
aagcgacacgcagagaacagcacggagggtctgggctgggcttctgaaggacgtgggccccccaggcacgtgaggggcagcaggcaggggcttcccagggtgggagctggtccccagggc

SEQ ID NO: 34907 - DNA, 120 bp, Homo sapiens
ctccgcgagtgggtgaggcaggcctgggccagagcagagggagtggaagggagcgcgagggcgggcggcgggagcacacaccagcagcaggcggatgaaggacagaaggcagtcccacag

SEQ ID NO: 34908 - DNA, 120 bp, Homo sapiens
cagcgccccctggtgctcgctgcggaacacgtgcggctgcagcagctccagcaggcccagcacgtgcaggaagcagctcaggtggttctgctgccggaactcctggaagttgaggtgggt

SEQ ID NO: 34909 - DNA, 120 bp, Homo sapiens
gtgcggccgtgcaggagcgccgcgatcatgggcaggtgcctgcgggcgcggtgagggcccagtcagccccggccggcgggctcacctggcgcacgtccccaggaaggccccactgcctgc

SEQ ID NO: 34910 - DNA, 120 bp, Homo sapiens
ccccgggagccagaccccgtgctgccccccaaccaccctcctgccctaaggaggtggggatgagatcgcccctctctgaggcccacccagctcctcccacctgaggcccagctcagtcct

SEQ ID NO: 34911 - DNA, 120 bp, Homo sapiens
ccccggtcaagctcagcccatgggaacatgcttttttttgttgtttttggagttttgctcttgttgcccaggctggagagccgcagacccccctggttaaaccagtgtctggcgagggca

SEQ ID NO: 34912 - DNA, 120 bp, Homo sapiens
cagcgggtgcgccaccgccagcttccggcaggccatgctggcatccgcccctcggttctccaacgcccgggagtcgctggtgtccgcaaggagcgtgatgaagcggtggatgagtccgtc

SEQ ID NO: 34913 - DNA, 120 bp, Homo sapiens
gggcgctctgaggccggggccgctggctcccctcacttgcccacccacactcagcctggccgccagctgtggccgtgatccaccgcgtggcacgccatgagcagaggaactggctcctta

SEQ ID NO: 34914 - DNA, 120 bp, Homo sapiens
atgcgtgttgacattcacacgtacctgtggccccatcccccatccctttcaaccctgtaacgaacattcccaaaccacccctgacttgtccccaggccgccagggcgccactttctgtcc

SEQ ID NO: 34915 - DNA, 120 bp, Homo sapiens
aggcgctgtttgctcttctggagtctgtgtgaatgaaagcacacagtgcacgctccctggccagctgctcggcgtcattattctttttttttttttgagatggaatctcgttctgtcacc

SEQ ID NO: 34916 - DNA, 120 bp, Homo sapiens
actcgtgttgttggggtgggagggggatagtctcctggcagatttctcccgggggctcactcatgtggtcggggtgggaggagaatgggctcctgacactctgcaccctacgtccatcgt

SEQ ID NO: 34917 - DNA, 120 bp, Homo sapiens
ggtcgtcccccaaggccgtcctcttggaagcccacctgggccacctaccccctctggcatgagtacgcctgggctcacctgccccctccgtcagaagcccgcctgggccacctgccccct

SEQ ID NO: 34918 - DNA, 120 bp, Homo sapiens
gaacgcacctgggcccacctgccccctctgtcagaagcccgcctgggccacctgccccctctggcatgagcgcgcctgggcctacctgccccctctgtcagaagcccgcctgggccacct

SEQ ID NO: 34919 - DNA, 120 bp, Homo sapiens
aagcgttaccaccctcacaatgcagaagtcgtaacgacaccttgatttagtgatcaataagtgctcaattagtgtttaaacgaggagaaagctctgagtcatctcgctaatgaacaaaga

SEQ ID NO: 34920 - DNA, 120 bp, Homo sapiens
tgacgtcaccagcatgaaggccctgaaaggcaatatgtttaggatatttctccatctacgctagagtttcatttttgatgatgggtacatagaaaacaatgatttataaaataattcaca

SEQ ID NO: 34921 - DNA, 120 bp, Homo sapiens
gatcgtcagtatataaagcttaaatttccaattaaaatatttcatcagctgagaggggaggggagaagccggggcccagatctctaagtccctatatttacggggcagcaaaatctgcac

SEQ ID NO: 34922 - DNA, 120 bp, Homo sapiens
gcacggcagcgctgcagcctctggtcacgcacttcctgtgcttattcagtctttgttcattagcaagatgactaagagctttctcctcatttaaacactggacagaaaagaaaatgagtt

SEQ ID NO: 34923 - DNA, 120 bp, Homo sapiens
aaccgtttgacagctgtgctaaatgtctgtgtgctggaatgaccacggagctcattaattcaaactgggacacctccgagtgggaaagaatgacttcctgataattatgctgagtaacag

SEQ ID NO: 34924 - DNA, 120 bp, Homo sapiens
ggccgaccatcgtgtgtaggagattccaaggtgacacagccaaacttatcagaaggtggaccctggctgctggtggaatatttgacatgaccggtgcccacgcccctctcccattcctct

SEQ ID NO: 34925 - DNA, 120 bp, Homo sapiens
gagcggcagggtcgcaacccaagagatgaacccccagtggccccgtcacgagctcccaacggaagggatgtcctagtgcagaggcagccaccacgctcgccccctgtactgggaaggccg

SEQ ID NO: 34926 - DNA, 120 bp, Homo sapiens
ccacgctcacccgctgtatggggaaggctgcttccagagcactccggggcgtgtgttgagaatgctggtgctggaatcctagtgcagtaagccaggaatggaaagacttcagtaaataca

SEQ ID NO: 34927 - DNA, 120 bp, Homo sapiens
tgacgaggccacgggccctttggcctaatgagcactgagctgctgagtccagcagaaccactgagcacctggaaagcatcccaggacatgcagtacactgtgctcggcctaggaaggcat

SEQ ID NO: 34928 - DNA, 120 bp, Homo sapiens
gcacgaattgctcaatatctaccaaagaccttcactctcaacgagttcctgcaatttgctacggtttgtttctaatgtgtggatgttgcggctgcttggccgacctcacgtctggctgct

SEQ ID NO: 34929 - DNA, 120 bp, Homo sapiens
cctcgaggcgaatccatgctgcgccttgtcccacaggcaaattccattctaactctgactcttttattttagtgccagggctatttaataaaataactgaaaccgaaggaggagcatgat

SEQ ID NO: 34930 - DNA, 120 bp, Homo sapiens
aagcggggggtgtgggtggcaccaaaagcacagcaggcgagacgcggggcacaggaaggaaggaagccacagcaaggcttctggtctctgccgctcatcagaaacctttcttccgccctc

SEQ ID NO: 34931 - DNA, 120 bp, Homo sapiens
tcacggtttctgtatcacccaaaacatcatgtttgttggaacttattttattttagattcaggtcttgttaaccattgctccaggatgctttactttccttgtcttaaacgggaacttcc

SEQ ID NO: 34932 - DNA, 120 bp, Homo sapiens
gcacgggtcgcagctccacacggacagaggctcctgggacctgggactggctctaggtcatgacagctcagcaggattccagggaccgacggattcagtcctgaggggcagaccaggtcc

SEQ ID NO: 34933 - DNA, 120 bp, Homo sapiens
acacggtggctacaagggcagaggtgagagcagaggtgtgaaggccacgcagcccccaggacgcccccaggacaggctggcctatgctaagccacgcggctccccagactcctgaatgga

SEQ ID NO: 34934 - DNA, 120 bp, Homo sapiens
tctcgtgagggccgtggaggggagcggaaagccaggcaggcagctgccacccgagcctggtgtttgctcggtcaaggtgccacagcccccatcaccccggggtgggggccaccaccatgc

SEQ ID NO: 34935 - DNA, 120 bp, Homo sapiens
gaccgagggccttctctgaggccagccagagggtcgatgttcctctgcgccttttccaaacagcaggatggtgcagaaacctcaggagggtaaaacccgtcagctattccccttggggca

SEQ ID NO: 34936 - DNA, 120 bp, Homo sapiens
agacgcgacctccagctctaaccaagactctcagaccacgttcaagttgcagccagcaaggagcccggagctggtatcccggagcttgttctttcctggggcgctttgtttcagtccaca

SEQ ID NO: 34937 - DNA, 120 bp, Homo sapiens
caacgctccgtagcgcggcccccaccctcctgccgtgtggggcaaactattcaaagtcccctggccgtcagaaggttccagagggtgtgcagtcactttcctccccattctcacagcagc

SEQ ID NO: 34938 - DNA, 120 bp, Homo sapiens
ggacgtggctttgtctgcatccctgcggcccctgccactgcactcgccaccatcaaaagcttctcctctcggagctcaaggacacatcaaatgatgtcacaccacttcacgcccttctcc

SEQ ID NO: 34939 - DNA, 120 bp, Homo sapiens
ccccgcttcagtgcctgggaagctgcacaaaataagattctgttatcaagcaacgctgcacttcccacatctggatgcacgccaagacaagacgtcagtcatttcctggtgaaatgaaag

SEQ ID NO: 34940 - DNA, 120 bp, Homo sapiens
ccacgcttcctccacgcccattgggtcacgaaatccttgctaatcctggccggggcactggaggatgctataaacaatcacggatctgagcaggtggatgaagggaacgtagatgacacg

SEQ ID NO: 34941 - DNA, 120 bp, Homo sapiens
gtgcgggcaatacacagactaagagtgggaactggcgaagtgagctataatcccaagcataaaggaaaggaggggaggtggcctccagcgcctctcctactagttaaaggagagagaggg

SEQ ID NO: 34942 - DNA, 120 bp, Homo sapiens
agacgggcacttggggcttatgtgcattatttgatggaacaagcagtgtctttgtttcttaggatggccatttttatctttttgataagtgtggaggaagttggcttagtataatttaat

SEQ ID NO: 34943 - DNA, 120 bp, Homo sapiens
gcacgtgtggtgtgtgcaggtgtgcaatggatgtatatggtgcatgtggggggtgtgcaatggatgtctatggtgcctgtggggtgtgtgcaggtgtgcaatggatgtctatggtgcatg

SEQ ID NO: 34944 - DNA, 120 bp, Homo sapiens
gcacgtgtggtgtgcacaggtgtgcaatggatgtatatggtgcacgtatgcatgtgtgtgtccccctcattacctcacatgcgtatagagcacagacacacaccttaataaagcccagag

SEQ ID NO: 34945 - DNA, 120 bp, Homo sapiens
aaacgctgtaaaactggacctgtgacttgaagcctccattccattgttggggacacacaagcagggctccctaaggggaggtcagggaaacgagagccaccacatacctgccccaggctc

SEQ ID NO: 34946 - DNA, 120 bp, Homo sapiens
catcgtctgtgggacacgcccattttaccagaaacacaaagttggtccctccatccatccttcgcctaagcagcctgcctctccagttgccatggcaactctgctctggttgccgcacag

SEQ ID NO: 34947 - DNA, 120 bp, Homo sapiens
gaacgcgagagcacttgagcaccagtggcctgacaactctgcctcgtccccatcacctctgcggcgagaatcagagcagtcgcagaagctcctgccacaccactcccataatctctcagt

SEQ ID NO: 34948 - DNA, 120 bp, Homo sapiens
ccccgtgcccagggtggtgagtggtgtcaccgttcggatggctcagatgaaggcggccaactgggcagcgggaatggagcctttctaggcaggcagacccaagcatactgctcctgaatt

SEQ ID NO: 34949 - DNA, 120 bp, Homo sapiens
aggcggacctgatagcccggagccctatccctcactaccccccagccccagccctgcaccagttaccaaagacaaacaagagacacgtttctccaaaggatggcaggacaggacagggta

SEQ ID NO: 34950 - DNA, 120 bp, Homo sapiens
ccacgccagctgcacagacgcgtgacaggcaccccagtgctgaagcccaaggaggaggctgacagcccagttagatcgagtccaagcagcaaaatcacacagcacatcccgacaatcagc

SEQ ID NO: 34951 - DNA, 120 bp, Homo sapiens
agccgcatcacatgcaaagccagagaacgaacctctcactccccaaatccaatcctccccaacatgagccacccccaccacccccgattgatggggagattaacatgccggaaaacgacc

SEQ ID NO: 34952 - DNA, 120 bp, Homo sapiens
tggcggagtgagagtccctgtggcccgaggttcctcctgtcatgcccacggcactcagaactgaggctggcatgcggagggtgtggtttccccggaccagacctcgttgtccagaccaaa

SEQ ID NO: 34953 - DNA, 120 bp, Homo sapiens
aggcgactgagcctggatgtgcataactgaagctgcctgaggactggaggactgaccggggccagcacagcgggcgggggcctgaggactcgaggactgaccggggccagcacagcgggc

SEQ ID NO: 34954 - DNA, 120 bp, Homo sapiens
aaacgtctcttgagtgagagctcagtttccaaatggagtgacaaggagcagaacttctagacaccggaagtggaaggttgctcaaggcagatgcacaaataaatgacaaatggcagtttg

SEQ ID NO: 34955 - DNA, 120 bp, Homo sapiens
ccacgcaggacacggagaagagccagggaagcaggtggcccatgcagggcacagagccacccttccgggcagggcaagcggcctctcatcccacgtcacaacccgcagctgctgctgtgc

SEQ ID NO: 34956 - DNA, 120 bp, Homo sapiens
gaccgtcggcaccaacggctggcatgttccttgggaaattagaggagggcgtgtctgccaaaggtggatttataacaagagcccaagagtgggactcactcttcccggggatcccacctg

SEQ ID NO: 34957 - DNA, 120 bp, Homo sapiens
tcccgggtgtacaggtatgtgtgtttgtgtgtccatgtgtccatgagtacacatatgtgcatgtgtttgtgtccatgtgtctctggtatacacgtatttgtccacgtgtccctttgtgta

SEQ ID NO: 34958 - DNA, 120 bp, Homo sapiens
gtgcgtttgtgtgtccatgtgtccatgagtacacatatgtgcatgtgtttctgtgtccatgtgtctctggtatacacatatgtatttgtccacgcgtccctttgtgtacacatatgtgaa

SEQ ID NO: 34959 - DNA, 120 bp, Homo sapiens
gtgcgtttgtgtgtacatgtgtgtgcatgcacatatttgtgtgtatgtgcgtgcacgtctgtgtgcatattctgcacatgagaaccagaacgcctgcatgcctagcagacaagatgcctg

SEQ ID NO: 34960 - DNA, 120 bp, Homo sapiens
acacgacaaagcaaagccaattagcaatgctgaggactctcaggccaggatgccgccctaggctgccttcccaagtcagctagcttgacaaaagctttcatatcagtgcctgcaaaaaca

SEQ ID NO: 34961 - DNA, 120 bp, Homo sapiens
aaccggatacgacttcttcagaaggcctagaaaaagagtctatttgaataaagcccagagggcctatagaatccaaagtatgcactcccacaataccccaaaacaaaagcaaaacaacca

SEQ ID NO: 34962 - DNA, 120 bp, Homo sapiens
ctacggacattctaatgctgatagtaaggttaaaatccccgtccacataacacacccacacacaaacacaaactggctgttgccactagcgctccgtggggctgaagatggcaagacccc

SEQ ID NO: 34963 - DNA, 120 bp, Homo sapiens
cctcgctgccacgcctacacaaggggaagactggcagagacggctccttcctcctgacccagaagccaggagagaaagctgatcagtcgcacaggccgggacccagcatgccctgccact

SEQ ID NO: 34964 - DNA, 120 bp, Homo sapiens
agacgggcaggagggggcctgtccctccagggtcagctcagccctcagagccacttgtaggaggtctgggcacaatagatacagtgactcctctgagaagctgcactgtgatgggacctg

SEQ ID NO: 34965 - DNA, 120 bp, Homo sapiens
gggcgtgaggctccgactggctgagtctgtgtcagcgtcagcaacagtgcccatcccgagctctttcccagcgcaccccaggacatggtggaaggtggaagaccctgcctacgggcagct

SEQ ID NO: 34966 - DNA, 120 bp, Homo sapiens
ggtcggcctgcatgcagacaagcaggccgggcagcgggaagaagctcccggaaagatgggagcaccaggccacatggagcttggacagggcaaggagtcagggggagggaggtaacagcc

SEQ ID NO: 34967 - DNA, 120 bp, Homo sapiens
acacgaacttgtgagacacaatcccttccccagattcccaactgtgtgatcctggcagggacccagcccaagcctcaggggctcacaggcagcgatgggccaaggaagggcttcagggcc

SEQ ID NO: 34968 - DNA, 120 bp, Homo sapiens
cagcgactccctgcaaactgagccctgtcctgcacaggtgagaagggaagggatggctcccctgccagttagagacagaggcttggtgcctgggggactccagccacccatcctgagcca

SEQ ID NO: 34969 - DNA, 120 bp, Homo sapiens
ggacgtccactccatagagcacacgaagaggataaaacagcagggtgcactccgggaccgcaggctccccccagcacacatgggtccctgtctgggcatgcacaccgccaggacacagca

SEQ ID NO: 34970 - DNA, 120 bp, Homo sapiens
agacgccatgcagaagcctcttcagggcaccgccatgagccaccctcagaacctgagctccaggcactacggacgattttaggaaacctgtgtctgttgcatttcgaatattctgacggg

SEQ ID NO: 34971 - DNA, 120 bp, Homo sapiens
tcccgttatttcaggagaagctaattccccacacagttagtgctcaggagggaggaatctaggagctcacttggccctaaagcccgtggtggctgcgccgtacttctgcccctcctcccg

SEQ ID NO: 34972 - DNA, 120 bp, Homo sapiens
ccgcggtgactgtgacaacaggaggggccacagccgccctgagcccctggttcccaggtgccagtggctgcagcacggaggccacctacggttcccagagcacgaagagctcctacgtcc

SEQ ID NO: 34973 - DNA, 120 bp, Homo sapiens
cttcgtatgtgttccgcaggcccctggcccggtggagcagtgacttgctcagaaactagcaaggcctctcggtagtggcctcccactgacctggctccccacctgccatccactatgctc

SEQ ID NO: 34974 - DNA, 120 bp, Homo sapiens
acacgagcacatacctgcaggcacacacctgcaggggcacacttgtggatgcacacctgcaggcaggtacatacctatgggcacatacttgcaggcaggcacccacctgcgggcacacac

SEQ ID NO: 34975 - DNA, 120 bp, Homo sapiens
caccgacgggacacacctggaggtaggcacccacctgcaggcacccacccacaggtgcatatatccccccatgtccaccctctgcacagcccccttgccaggctgccctctgcacatttc

SEQ ID NO: 34976 - DNA, 120 bp, Homo sapiens
ccccgggtacacagcgtggcatttgatgagtacagctggaaatgaatgagcagaggcaccatgaggacatggtccaggcacacatcaaaggcggtggccagaggccgcctggctccccat

SEQ ID NO: 34977 - DNA, 120 bp, Homo sapiens
ccccgccatggaacacagaatcagagtctgcgtgggggctgcgtccaccccatctgtttgcccagcttctctctctagcatgctcagaccccacagaggcgcagggctccttcgcctccc

SEQ ID NO: 34978 - DNA, 120 bp, Homo sapiens
ggacggtgtctgctgcggtgtgatgtctggcagaaagagccggggccagtgtggctgtgagcatcaggcctgaattccgtgaactgaggaacagcctgacagagggacccagcagcagcg

SEQ ID NO: 34979 - DNA, 120 bp, Homo sapiens
caacggccacttcccggcttaacctgggcagagagacgagagccacttcccggctttaacctgggcagagagatgagagttctgtaatttttgaagattgaattcagtctgataaataat

SEQ ID NO: 34980 - DNA, 120 bp, Homo sapiens
tgccgctgtggggccggccttcaggggtggtggggtggcccagctgcctccaccccagctccctcccacgtctacatccaagatgtctggcttccactttccgtgtcactaaagggcggg

SEQ ID NO: 34981 - DNA, 120 bp, Homo sapiens
cagcgtcgtctccagtgactggcacctcagacagccccacacccgcggcaggtcccgcctggcactcgggaagctcttgcatttaagagatctagaaatgttgacactttgcgtggaatt

SEQ ID NO: 34982 - DNA, 120 bp, Homo sapiens
agccgagcagcgaggcactgtgagcacacgggatgatgggtgctgggtgctggagttgaccggctggcccggcagagctggttcccgcggggaaccccgggggcgtggtgctcacagcaa

SEQ ID NO: 34983 - DNA, 120 bp, Homo sapiens
agccgcctggaagccagggagcatgtttttgtgtgagtgttgattgtggacaacgcccagaccctgcctgcagcacagaggaattccaggtgtcaaagcgataggaattcagggagatga

SEQ ID NO: 34984 - DNA, 120 bp, Homo sapiens
ggacgtgggctccacaccccaccttccacctcaaggaggtggcagtgggaacccttacacgggggtgactgagcatctgagcgggatcaccgtggcctgggggcctgcccctcgcccctg

SEQ ID NO: 34985 - DNA, 120 bp, Homo sapiens
agccgttgtgggcacagcctaagcttctgcaggccttctctctcacctctctcatatccttccatcatttaagtagattaaactcagaaacatttttagtgctgtgtacaaaccaagggc

SEQ ID NO: 34986 - DNA, 120 bp, Homo sapiens
ccacgtgaccagctgtgaccacggacttaggaacactgtttcctacctccttcacctcacctccctgccacctccagcccgtaatttagagagaagctgatgcagttgactcttcccagc

SEQ ID NO: 34987 - DNA, 120 bp, Homo sapiens
aaacgcacactgggttatgtgcacagagatgctgccccagtgactgtatttgggtaactgtttcaccctcgtggtgtgacagcccatttgagcgctcttcaaggcacgagatcctcagca

SEQ ID NO: 34988 - DNA, 120 bp, Homo sapiens
caccgtcaacaagtctgtgtctcacctgcaatcacagctcattgagccgccagctaattagagagcccctaagtgaatcagtgacacaatgccgcctgcaaaagcatcagagccgcggcc

SEQ ID NO: 34989 - DNA, 120 bp, Homo sapiens
cgccggcccacggctacacggtgctctggaaacataggctagcgagagtctaaagaggtggtgcaggctcaaagccatgtgctcgtcatcacagcttccatttaaatcttgagggctggg

SEQ ID NO: 34990 - DNA, 120 bp, Homo sapiens
ctccgtctcaaaaaataaaaatgaaaataagcaaatacattttgtgtatggtttaaaagcatataaaacagtagtagagtcatacacatactcctaaataacaaaggcaaataggaatac

SEQ ID NO: 34991 - DNA, 120 bp, Homo sapiens
cagcgtaggagccttttcctcaggagggctgtgtcctgctcctaaaacatttccagggttcgggcatcaagatcagatcacacgttaatcaatcacacgtttaagaacgcctgaaagaca

SEQ ID NO: 34992 - DNA, 120 bp, Homo sapiens
attcgatgtcgttggattttccaacatggactgatgctcttcaattctctcaagcgcgtttacacacacacttgtttgcctgtgtgtttttgtgtccaatgtgtgtcgtgcacaggtgca

SEQ ID NO: 34993 - DNA, 120 bp, Homo sapiens
caccggactcacaagactcagtattggcagcgtcctacatttagagagaatccagacaaacagctggtgggcactgggcactgttgtgtgccaggaactctccgagtcagccaggcactg

SEQ ID NO: 34994 - DNA, 120 bp, Homo sapiens
agccgggcactgggcactgtgtgtgtgccaggcactctccgagtcagtgtacatgaatgcacttggccctcttgatgctctatgagtaagtgctgctgggacacacccatttcacaggta

SEQ ID NO: 34995 - DNA, 120 bp, Homo sapiens
tgtcggtggttttgacagaaattatggactctttctgaacttcctaatgagaatttaggaggctctcaggtgccccttcctgtcccactccatagtttggcgtacggactccgcttattc

SEQ ID NO: 34996 - DNA, 120 bp, Homo sapiens
tcccgcaggaaggcattcccacccagctcctctgcccgcatccaatggagtgagcaggtgcaggcgatgaatgtactatcaccaataattttggaacttctactacatatgtgtatctac

SEQ ID NO: 34997 - DNA, 120 bp, Homo sapiens
gctcgttgagctggacttttaaagcagcagtgcctcaatatgcctggcctggctggcacacgccgcctgcctagattgcatagggtgagcagtctgcctgtgcccccacgagcccggctg

SEQ ID NO: 34998 - DNA, 120 bp, Homo sapiens
tcacgggtgcacttacgcacccccagatgggacagcccgccacacacctgggctggatggtaaagcccattgtgcctaggctacaaatctgtcctacaagttactgtgctgaatgctaca

SEQ ID NO: 34999 - DNA, 120 bp, Homo sapiens
agacggagattgtgaaaggaaacatcttatactataactagttcctttaggggcacttttccttgatttctgaactaaggacctgtatttgcactttgcacgggccgtgcaaattaaaca

SEQ ID NO: 35000 - DNA, 120 bp, Homo sapiens
agacgaaccacgaccaactcagctgtcccgaggctctgtgttaacggctcctgacacactcccctcctccctgttctgatctgtttgcattaatatgcgctcaattgtaagaagctgaac

SEQ ID NO: 35001 - DNA, 120 bp, Homo sapiens
catcgtcttagctcccgaggtgcttagcagaatgctctgtatttatcagcttcccggttaacctacacaccactccccagctcttgctggtttgagttatgtgaaccttcaacatcatta

SEQ ID NO: 35002 - DNA, 120 bp, Homo sapiens
caacggcaatttttgtgctcctcacaaccaacgagggtgtgatttttcccatctgtcttcccttcctcacccctcccttccccttctcttccctttgtctctcctccctctcttcctaca

SEQ ID NO: 35003 - DNA, 120 bp, Homo sapiens
catcgattccctgatattcagatcaatcagctggagtgacaggaaacacgttcgctcccattggaaacagcacgtgctccagcagagctcaggtgttgttgaagcccgttagaactggca

SEQ ID NO: 35004 - DNA, 120 bp, Homo sapiens
gcacgcgtgcacacgcacacacacccacacacccacagcatccctgggagaagctgcagcacatgtgtaagctgccaataccctgcacacggctctgtgactggagataatgaggaatcg

SEQ ID NO: 35005 - DNA, 120 bp, Homo sapiens
acccgggaacaagcccacagcgccttgtttccccgaacgcagagccccggcagcccctccatccaccgagacatacacggctggaaggacgtggtgctgcggaccatgggtggttcttct

SEQ ID NO: 35006 - DNA, 120 bp, Homo sapiens
agtcgccattgacggccagggttctcattcctgaatttttgtctttgcttctggttaccagagatccaaagctgcagtcgtttagctggtttctgtttccaggggtattgtgaatggaaa

SEQ ID NO: 35007 - DNA, 120 bp, Homo sapiens
gaccgaagacgtcacaaggaaagcaaataggatttaaaacagcaaagcggtgcctttgccaattccagggagtgtttctgctacataaccctgtctgtgctgggcagtgccgctcccgtg

SEQ ID NO: 35008 - DNA, 120 bp, Homo sapiens
actcgtgccccaggctgcagggacacccacagagctgacttctcctcggtcaaccagcccccagtgctcggaagcatctggcccaggcacaagcatgctcctgctgctacggcagctgaa

SEQ ID NO: 35009 - DNA, 120 bp, Homo sapiens
tggcgggggcacagatgccccaggtggacggccaggcctctggtccacacacaggcattcactccccatgtggccatgagcccccgattctccaagtcctgtgttctcacctgtaaaata

SEQ ID NO: 35010 - DNA, 120 bp, Homo sapiens
atacggaagctatgctagacaactgctgacttccctcacctgagctctgtggtactcagatatcctcactggtgggaaagggaaaggccacggccatcatgggcaggaggacgcagtggt

SEQ ID NO: 35011 - DNA, 120 bp, Homo sapiens
gggcggtggcactcacactgtgctggagtcaggctggctcctggggagcacgtcagtcacctgcttaattcaccatgggttagctctccgcgggcgaaggatgacgaaattacgttgtaa

SEQ ID NO: 35012 - DNA, 120 bp, Homo sapiens
ggtcgggctacagacttccctctgccccctggtcacagaggtgagagtggggcctcatcccagtcccgccgcgacccatggggcagagctgctgccctggcccaggcacgcacagcttct

SEQ ID NO: 35013 - DNA, 120 bp, Homo sapiens
catcgcaggctggccctggcctccccaaccagagaccaagctcccaggctgcagaggcagcgaaggccgggacacgcacagggcagcgggcagccagtgccacgtgggctgaggaggcac

SEQ ID NO: 35014 - DNA, 120 bp, Homo sapiens
taacgggagacagcgcccagccagggctggttttctcaccgtcattgtcaaaggccttttgagcattttcacacacacacacaaagaagccgtttaaaacaataaaagtgtagtgctggg

SEQ ID NO: 35015 - DNA, 120 bp, Homo sapiens
acccgcaaaaggaatcaaaacaaaaagacctttaaagagacacacaaaaaggtgacagcatcgtgaggtgaagtctgtgtgtgtgtgtacatgtgcacgtgtgtgtgcatgaatgtgtca

SEQ ID NO: 35016 - DNA, 120 bp, Homo sapiens
tcacgtgtgtgcacgcgtgtacatgcatgtgattttgttcacatgcatgcacatgtggagggagcgagctgctcccctcctcgccgagtgagttttgtgccttgcccgcttcctgtgctc

SEQ ID NO: 35017 - DNA, 120 bp, Homo sapiens
cagcggtgacccgcctcggggtctgtcctgttttgccacaacagctgtagagaatgccaagcagctcagcagtggttcccaaaataagactgttgagagcccagaaatagcccccagaga

SEQ ID NO: 35018 - DNA, 120 bp, Homo sapiens
acacgagcttgtgacatgatggtacaatggcctcaaggaaattgcagctttggaaagaaactttattttctgtcttttgaaacaaaccgacatcctgtcctctgtggagacccaggcccc

SEQ ID NO: 35019 - DNA, 120 bp, Homo sapiens
ccccgctgaagtgctctttcaatttgctcttttaatttgctcttttaattattctgaaaggccatctgctgtaagagtgcctccctgatttaaactatgcctcacaccctcaaaacttac

SEQ ID NO: 35020 - DNA, 120 bp, Homo sapiens
ttgcgtaatctcaaagcaaacaagattcagagaggctcacttcctgggtaatgcaggagatgccctccgaggtagggacaggggcttgtgcccaatgtggggccactctgcagagaacca

SEQ ID NO: 35021 - DNA, 120 bp, Homo sapiens
ctgcgcccatccaggatgctgccaggagcctgcatccagacaccctcagcggttgtgaaccagccctcccagcggcaggacccccgagcagttgtgaaccagcctcagggttgccctcca

SEQ ID NO: 35022 - DNA, 120 bp, Homo sapiens
gatcgagaccagctctggaggcccaaacaaacactcctcctgtgccctgcaccctcaccttcccttccagagaaatagtgtgtcctgccccagctcaaaatagggacagcacagggctcc

SEQ ID NO: 35023 - DNA, 120 bp, Homo sapiens
caccgggcacacactgggcacacactggcttacagccacccacccgagggacaggctggtgccaggggaagctgtgtctgagtgctccatcatgttatccgggacctgctcgtccctctc

SEQ ID NO: 35024 - DNA, 120 bp, Homo sapiens
tctcgtccagcatcctcagagtccaatccactctaacaggatcccctttggtcacatgacccctcctgagccaatcactgcagccaggaccacggaacattctggctgactcacgggatg

SEQ ID NO: 35025 - DNA, 120 bp, Homo sapiens
gggcggggaggactcagagttctcgctggacctttaatgacgtgtgagggagaagagaaacacgacacggtcagggagacgtcacaggttttccccagatcctcaggggaaccacacaca

SEQ ID NO: 35026 - DNA, 120 bp, Homo sapiens
gagcggcggggccttgagccagggcgaaagcaccgggcgctccaggatcccaggctccttccctgaacaagcatccaaacctctcaagctagggctgactacaaacgacaaagtcctgta

SEQ ID NO: 35027 - DNA, 120 bp, Homo sapiens
cgaagttgccacctcttgcctgagttgccggaaatccaagggtaggtttatatcaaatcagcagacaaacttgacttctgggtaaaggctaaaatgaatcaacggagaactgacgagact

SEQ ID NO: 35028 - DNA, 120 bp, Homo sapiens
tgacgggtctgtaagagttgggggctgcccgccgcctggtcagtcacgctatgcagctcttaggttgaatcctgggctgccctggctaccaggatgcctcagggaggggaggaagcagga

SEQ ID NO: 35029 - DNA, 120 bp, Homo sapiens
gagcggcgtggggcgactcctcccaacagggggagcagcgtggagcaaatcttcctgatgggggagcggcgtggggcaaatcttcctgccaagcgtgcgagctgcttgtccccacctggg

SEQ ID NO: 35030 - DNA, 120 bp, Homo sapiens
gggcgagccacctcttcctaccaggggtgcccatgaggtccttcctaaaagtaagactcagcagggagggttccaaggcctgtggccagcaggtgaatcacacaggagcttcctctacca

SEQ ID NO: 35031 - DNA, 120 bp, Homo sapiens
tgacggtgtcagagtggactgttggccaccagcaacggggctgcctgggacggccaggggcagagctgctcccatgtggcaccctaccccgagtcctgggtgtctgggctcacacccatc

SEQ ID NO: 35032 - DNA, 120 bp, Homo sapiens
acccgtctctgggtgtcattccagcagcaccttctcctcctttcaggatggccctgttcagtcagggtcctgccctctcccactgcacggggaggtgctagagaagggagggggcctgtg

SEQ ID NO: 35033 - DNA, 120 bp, Homo sapiens
ctccggcagcctcgcctggctccagcaagagcggaatgttcacaggcctgtccaccgtcacctcctaacaggtcctggagaggccaggccacgccagtgccatcacagactgtgctcggg

SEQ ID NO: 35034 - DNA, 120 bp, Homo sapiens
agccggccgtgagccccagcgcccaggcgcctcctcccctgttgcagccccactgggtccccaagtccccacccacggccagtgtttgtttctccctgaaaacctgatttgacttcactc

SEQ ID NO: 35035 - DNA, 120 bp, Homo sapiens
aaacgtcagtttgataaacctgacgctgccctcccggctgggggcaggaatctctctaccacctgtgtgagaagaggccgagcctcagagtcccaggccaaaaccctgttagagcagctt

SEQ ID NO: 35036 - DNA, 120 bp, Homo sapiens
cctcggaccgtgcagctgctcgccagaacgtctcaggaaaactggctgcggcctttcctgtggaatccaaccgagatggcctcagcctgtctccctttcctcgtcctcagtgctcctcac

SEQ ID NO: 35037 - DNA, 120 bp, Homo sapiens
ctgcgtcacatgcacagaagccaggtcctctcctacggccatttttgggatcccaagaaagcccccagtgtcccctcactgctgtgcagcttacaccccaagttcattgctcagggcccg

SEQ ID NO: 35038 - DNA, 120 bp, Homo sapiens
aaacgcggccgcacccggcggggcaccatgccagaccacggccctctgcacagcagcaagcccaccacagcgtgtggaccgtgagacctgccaccgtgacttctccccaaaagggcctga

SEQ ID NO: 35039 - DNA, 120 bp, Homo sapiens
cctcgctgggcaagagcctcctcccaggcatgtcccagcctcagggctttgtctccagagggggcaggccctgggtgacacagcccctcagccccactgccctgtccccgaggctggcca

SEQ ID NO: 35040 - DNA, 120 bp, Homo sapiens
actcggccctgagcttgttctcaccaccaaaggaagagccaagcgcccccacctgctcacctctgccctgactgtcctcaccctggatcccttccctaattaaatccccccgtctgcaac

SEQ ID NO: 35041 - DNA, 120 bp, Homo sapiens
catcgcaggtggtgccgtccctgagtgcaggcgccagaaaccccaaggaggctccttggcagagcctgagccggaccagtgaccccgcggcctctcgggaacaggtcagaggctctggag

SEQ ID NO: 35042 - DNA, 120 bp, Homo sapiens
gttcgtctggccctaatctccacccacccctcgcctctgccccagcccataacggggccgtcctccaacaatgagtgggcaaaggtgcagggctgaacgcagacagccgcctgctgctca

SEQ ID NO: 35043 - DNA, 120 bp, Homo sapiens
tgccgcatcttggggtctatgctgcctggtggggccaggagaccctgagagggcgctctgccccaagtcagcctgtccctcctttgccccagatggctcctgctcccacctcctcctgtc

SEQ ID NO: 35044 - DNA, 120 bp, Homo sapiens
ccacggcctcacggcatccgtcactttcgagggtcatcacaatatgaccagaagcccacgggtggctttgaaagagatgaaggcggtgacatacgtgcccagtaaggacgcagctaggat

SEQ ID NO: 35045 - DNA, 120 bp, Homo sapiens
actcggtgcctccctgcagcctccaccgttaagcaaaagcgtggatgtatgaattccaatttaggttttagctaatgcttgcattccagccattaattgccttgagctaaatacctaatt

SEQ ID NO: 35046 - DNA, 120 bp, Homo sapiens
acccgtctccataattaggccctgacggactcaggccagggcggcaccacctgcccagctgggcagcccagaagcagcagggccccagggagcccggtggctcagccacacatgctgccc

SEQ ID NO: 35047 - DNA, 120 bp, Homo sapiens
ccacgcggcccgataaggccgacccgcccagcttgctcccgctgccagagcctcttccccacctctccaggaaacaaagccacctgcacgggtacccggcctgccttgcgtcctgccagg

SEQ ID NO: 35048 - DNA, 120 bp, Homo sapiens
ctgcgtcaagctgttagccaagcgggcagtgaagacgaaggctgccccgtagccagggagctgacctctctgcgcaggtgccggggtacgagcaccagcagagccgagagcgggggcagt

SEQ ID NO: 35049 - DNA, 120 bp, Homo sapiens
ccacggtcttgccccaccccggctcctggccatgctacccagccacacggcacagggcaaatgccagcaggacacaggccctcagcccggcatcatcgtcagcccgaggatgctgggcca

SEQ ID NO: 35050 - DNA, 120 bp, Homo sapiens
tgccgactcagcagggcagcaagagggcctcactgctgagggtgaagccaagcccagcatggcgtgccccactccagccactccaccgccagggctgctttctgggaccactcccaggat

SEQ ID NO: 35051 - DNA, 120 bp, Homo sapiens
ggtcggcaacaacatgcccccagcagagtggcccagacacaggagcaggctgggtgtctgagaatcatccttagaacacagagagaagtggacttggaaggatataaatcagaacggtaa

SEQ ID NO: 35052 - DNA, 120 bp, Homo sapiens
tggcgccagtttatgtctgggcatcactatttttcaaagcttccaggtgtttccaggtgttaccaccggcatggctgacccccttgttttgcacgtaagaaatccaacgtgcacagagct

SEQ ID NO: 35053 - DNA, 120 bp, Homo sapiens
gtgcgcagggtggtggcagggcaagacaagcccaagcttcctgactgatgcccagtcccctatgcttgtcccacaaagatcgagactctattgtgcatacaggcatgcacaccccccacc

SEQ ID NO: 35054 - DNA, 120 bp, Homo sapiens
tcccggtggagcaacagcgtgcacacccacgcacactcccgatcaacaatgtgcacacccacacactcccaatcgatcaagagtatgcacacccacacacactcctggtcaatcaacagt

SEQ ID NO: 35055 - DNA, 120 bp, Homo sapiens
ctccgggtggatcaacactatgcacacccatgcacactcccggtggatcaacactatgcacacccacacacactccgggtggatcaacactatgcacacccacacacactcctggtggat

SEQ ID NO: 35056 - DNA, 120 bp, Homo sapiens
caccgagcactcgctcgagagcgtttctgttccttgaaaacaaatgagaacgacaacagcaagatgctcctcaatcattaaaaacaccaaagagcatctgttcgtgccccagcaagtgag

SEQ ID NO: 35057 - DNA, 120 bp, Homo sapiens
tgtcgccataacaggagctgggatttgtcctagtgcatcataaaagaattgggagctgggatttgtcctattgcatcataacgggctgttgccataacaggagctgggatttgtcctagt

SEQ ID NO: 35058 - DNA, 120 bp, Homo sapiens
caacgggctgccatcataacagggcctgacatggtggaaaatcgtcaagtagaaataaaagaatctcatttggacatagtttataagcaaatatggttatagcattttatttcaacaact

SEQ ID NO: 35059 - DNA, 120 bp, Homo sapiens
ggccgaccaataggatttgactgttagagagacaacaatacattttcctagtgacttgtgggataaaccgcttgttgcttgtttttattttttacatttctgcatctttccagaatctca

SEQ ID NO: 35060 - DNA, 120 bp, Homo sapiens
tgacggaacttctcccggtgggtgctcaacacagcgctgccttctcctctaagagctcagctcctgaaaaggttcacgcgaggatgctcacagcagccaaatgctgggaacaacctgtgt

SEQ ID NO: 35061 - DNA, 120 bp, Homo sapiens
agacgtggtgtgtccctcgacggagcacgactcagcgacaacaggagcaaagggtgggggtaggaaggtagcgttgcgtcaccccgaccggctgctcagtcagttcccaatctagctcct

SEQ ID NO: 35062 - DNA, 120 bp, Homo sapiens
ttccgccttctctctactgcacttgaccagtcttcaaaaaattaaaaaggaacaaatgtatacagtgggaggtgaggcaagagggggtcggagcattcaccgaggtggagaacaggctca

SEQ ID NO: 35063 - DNA, 120 bp, Homo sapiens
acacgtgtcaccgcgacagtcactggggaaacacacatctaacaatacccacattgttgggggcagtggctcccgtgtttctcagctgtggacatgccacaggacaggacccacgagtga

SEQ ID NO: 35064 - DNA, 120 bp, Homo sapiens
tttcgggggcagaagaggtaaagaacagaggccggagatgcagacagaccgaggtgcaaagtggctgcctgagagctgcggcctagaacaagtcaccgaactcttctgaattccaatttc

SEQ ID NO: 35065 - DNA, 120 bp, Homo sapiens
cgccagcctcgggctaaaccagtcaccatggcaaccataaatctgagccagcacaggaaccacttctcctatcgctccccgtcagcctcgcaaagcgcagttttctaagactgggcacca

SEQ ID NO: 35066 - DNA, 120 bp, Homo sapiens
cttcgctgtttcctagaccttcagtgcatcataaaaaaaaaaaatcaaatatcatctgtttctacaaatcaaggcctgaatatgtgtatttacatttaaattgcttttcctttccaagga

SEQ ID NO: 35067 - DNA, 120 bp, Homo sapiens
agacgactctatgtctgggaggcaagtcaaggttgaggagaaaaatgtctgagaatgatcacagtcggacacccaggccggcctttgtcaaggagccggggagacagcctcggcttttat

SEQ ID NO: 35068 - DNA, 120 bp, Homo sapiens
ttacggctccaattaaattaaacacacacacctgcttccattatcatcaaaagctgttgagtccaggcagacgacgtaggattttcaatatcgctatttttcttaaggctgcctccaaat

SEQ ID NO: 35069 - DNA, 120 bp, Homo sapiens
gcacggagtagatgccagggagccccagggggtcctaggctgggccagaacctcacccaccacccacactgcaccccacgagctgccggttcccacttgtcacactcggcacaggaatct

SEQ ID NO: 35070 - DNA, 120 bp, Homo sapiens
tcccgaaagaagagaaaacagcagaagctgccgccgctgaggacctgctctcctcttggcgcctccaccgtggcttcccttcccgaccccagaagctgcctaggcacagacacagaggtg

SEQ ID NO: 35071 - DNA, 120 bp, Homo sapiens
atccggaacccagggctggtcccacctcagggcgcacgagctcctcggtttcgcttctcagaccctcagaggcattcacctcggctccccctggatgcaccagtgcaggggaggcctgtc

SEQ ID NO: 35072 - DNA, 120 bp, Homo sapiens
cttcggttctcagcagtgaatattcagattccacagccatctggctgtcatttcacaagctctttgcaaaatctggctataattctaccaaggtacgaacgttagttaatctgttgaaga

SEQ ID NO: 35073 - DNA, 120 bp, Homo sapiens
tgccgcagctcagaacccaaaagggctgcggacgcataaaaggggaagtatcagaggagaaggggccaaggccgctggggaagctgagagactgcagagcaccacgcatgcgcatcacac

SEQ ID NO: 35074 - DNA, 120 bp, Homo sapiens
agacgctaacacacagctaagctcagcactgagaagaagtcattttaaaagctcttccattccctgcccatcccttctgagcctgacaccctacatcctgcttcctgaatctagcttcat

SEQ ID NO: 35075 - DNA, 120 bp, Homo sapiens
gaccgagcaggagagacagggaacaacaggcagagaagctcacagatgtgcaaggagcaggctcttcttgggggaagggacaggttgctcattaccatccaaccaaacggaatcagaggc

SEQ ID NO: 35076 - DNA, 120 bp, Homo sapiens
tcacgccatctccttcacaaagccagcagagtcctgctccgatggctctgcctctcggctctgtgtgggctccctggtgaatgaaaagtctgtgtaggcaaatcggaaggccaaaacaaa

SEQ ID NO: 35077 - DNA, 120 bp, Homo sapiens
tctcgaagcaaaatctgcatgaaaggctgactctatcattggcaagtgaaagttgtgcttctttagcaaaaggaagggggggcctttataaaactgcccccctaaacataggggccacct

SEQ ID NO: 35078 - DNA, 120 bp, Homo sapiens
cagcgtaaagcccttaacaaagggcttatgttcaagttaaacttaaggaaaaagcactgagacctgcacaaaggatgccctgaaatcacagagaaaggcgggccggtcgggaggaaaact

SEQ ID NO: 35079 - DNA, 120 bp, Homo sapiens
aatcgtgtcactagaaaggatgccatgttcccctgtgttcagcttcgataatggtctcacagataattaattaatgccataagggagcccttccgaccagaaaggaacaggcagagtggg

SEQ ID NO: 35080 - DNA, 120 bp, Homo sapiens
catcgtggagtgcggctcaaggccacgagaataaactcagagacagcagttatcgaccctgggtttcatcaagagctccttcactgtcaacatgagaaaggccccttgctcaagacaagg

SEQ ID NO: 35081 - DNA, 120 bp, Homo sapiens
tgacgtaacagaggagcaaaaacttggatctccttgaaccacatgtgttctggaggcctcaacgtgaagttgaatgttaataggtaaataaataaatagattacaaatggcacagctggg

SEQ ID NO: 35082 - DNA, 120 bp, Homo sapiens
ggccggatttaaggccgctctgtgcatctttaatcgagcctcattatttggaacaatgtagttggcgtgaccattgccaaacaagatccagacaggagagaaagaaaaatagcagcacct

SEQ ID NO: 35083 - DNA, 120 bp, Homo sapiens
gcccggcacaggtaagaaagcttctccttgcattctccgtggattgtgttctgacaaaatggcagcaacactgagtgaggatggtacaaggtggaggggacataggtagctgacacatgg

SEQ ID NO: 35084 - DNA, 120 bp, Homo sapiens
cctcgaaacaatttcaacgatgtctgcatccttaatgttttcccacaaaataagtgtgtccataagtctctttatgacacagccttctgttaccagtgacaccgtgatcagagccgaggg

SEQ ID NO: 35085 - DNA, 120 bp, Homo sapiens
ccacgcccatgtgtgcttcatgtgtaggtgaagggcggcacctggcctcagagcaaacaactctcccataaggtgactggccaggtcaagccagctggaggaaggaatacaaccccagca

SEQ ID NO: 35086 - DNA, 120 bp, Homo sapiens
ccccgtgctccagcatggaagggtgagggcttcacctgggccctgggggcacagtgactgggctacatcccagaggtgcgggaccagcacagacactccctcccaggactccaaggcagg

SEQ ID NO: 35087 - DNA, 120 bp, Homo sapiens
cagcgcctgtgttccttctaacagagacaagcaggttagggagtgtgaggaaacctcaaggcaagggaggaattcaggggactctggcttgagggaggggagcgtcaactcaggagtcca

SEQ ID NO: 35088 - DNA, 120 bp, Homo sapiens
tgacgataaagcactactggagaccagaagggcctagaggccgagaggaaggtgccggagcccagctgcactgaggtgggtgcaggcggcgctgggcaacggcgaaggacccccctccat

SEQ ID NO: 35089 - DNA, 120 bp, Homo sapiens
ccccgcctgcgtttgcttctgcaccccgtggacaccgattatcctaacctgtcatgtgtaattctggccccgaagccgcctggaaacattggctttatggtaaatcttcttaataaacaa

SEQ ID NO: 35090 - DNA, 120 bp, Homo sapiens
tgccggggactggaggttttatgggtttaaaacaggggcgtccgcctgggaaagcagcggcttccactccctcgctgccgtgaagctgccgccctccctttcctcccgcggctgccacgg

SEQ ID NO: 35091 - DNA, 120 bp, Homo sapiens
tttcggcggcgctgcccgcgggggggtgcgggggacgcaggtagaagcgggtgcagcgggacatccgaggcccggcccctcgcggcacacgcggcggaacacgagcggggggcgcaccca

SEQ ID NO: 35092 - DNA, 120 bp, Homo sapiens
ccacgccggaccagggccgcgcgctccagggccaggggagtgccgagtggcggggctcggggcgtgaggcccaggagccggggtagaggcaggaggcggcgccggggaggaaactgaggc

SEQ ID NO: 35093 - DNA, 120 bp, Homo sapiens
gggcgcgagacctgctccgagcccccagtgaggacagagaggcgcgcgacccgtggccgggggcttgagacccagagcctgggggtgtcgcgctggaaccccgagacccccggagccccc

SEQ ID NO: 35094 - DNA, 120 bp, Homo sapiens
ccccgacccgctcgccaaggcgcgctccccactcactcactgaggcacccctccccacccgccccgtcactcaccgagacgcccctcccctaaaccccccactcattcattgaggcgccc

SEQ ID NO: 35095 - DNA, 120 bp, Homo sapiens
ccacgacattagcagtgacggcccaggcctctagggccataggacactgggcaaaggcagggcaacacaaaagcccagcagttagaaagaacacgtgcagactagcgagctgcctgtggg

SEQ ID NO: 35096 - DNA, 120 bp, Homo sapiens
ccccggatgcagaagctgtgcagccctgtgctgtacagagcgcaccaggatgaggggccggtggggtggacatcctgcagggcctctcctccctgtgtgagtgccctggccacctgtgcc

SEQ ID NO: 35097 - DNA, 120 bp, Homo sapiens
ttgcgtagcaaaaaacttggtagcataaagcaacaattttactgtatctcatgaatcagatgctcactcttggggacacatgcctgtgcttaaggtggcagctgggtgttggatgtctgg

SEQ ID NO: 35098 - DNA, 120 bp, Homo sapiens
ccacgggctccgagaggaagtagaagctgccaaactttctgaaggccacttcctcaatattccgtccgtcaaagcagcacaagcccaatccagattcaagaggagaggacataggctgca

SEQ ID NO: 35099 - DNA, 120 bp, Homo sapiens
atacgaactgaaatgtttagagataaagaggcacaatgcctacaactgactcaagtgattcaaaaaaatgtaaatacaaaggatgataaagaaaatgtggcaagtggtaaaaactggcaa

SEQ ID NO: 35100 - DNA, 120 bp, Homo sapiens
ggacgtagggtattcaggattcctttgaattcctcttgcaacttttcttttaacttagcagttatttcaacaggaaagaaattacttctccaccctaaccctgccaccctcctcctccta

SEQ ID NO: 35101 - DNA, 120 bp, Homo sapiens
gctcggcctttcccattccttttgtctagaatcttcttttcccaaatctctgcatggcccatttggatctctgatcaaatatagtcaggcaatgcatagtgatatttcagtcaatgacaa

SEQ ID NO: 35102 - DNA, 120 bp, Homo sapiens
agacggatgatggacagacagatggacaaagggtgtgccttgaggtgtccatgtgacacagaggacggggatgcagtgggatgaactggtcctgagctcagacaacatctgtatcagtga

SEQ ID NO: 35103 - DNA, 120 bp, Homo sapiens
aggcgctacagaggccaagaaggatggcccacagtcaaggagaaaggaagtgcccggtgtcaaaggcccacagtcaaggagaaaggaagtgcctggtgtgaaatgccgagcggctacgag

SEQ ID NO: 35104 - DNA, 120 bp, Homo sapiens
aagcgcaagggctccactcaagtcgatccagaccaccagtaatgaacgcaacaggaagggatactccagtatcaccctcagtgttccaatgttcaggtgtctcggcagtccccgctgcac

SEQ ID NO: 35105 - DNA, 120 bp, Homo sapiens
ctacgtatgattatcctttagaagagctgtttttgacatgtggagtgtaatgtgctgggcagaggagagtcaaactgagctgggaacaacaggaaggatgtcagctgctctgacgtagct

SEQ ID NO: 35106 - DNA, 120 bp, Homo sapiens
aaacgcgagtgcagacagcaaatgaaacagtgcacgacgtctcctttcaaattatctgactgcacactgaacacctcccttcaaaagacagagaaaaacaaatcacgactgagctaacat

SEQ ID NO: 35107 - DNA, 120 bp, Homo sapiens
tcacgtgaaattagttgaacagaaaggaggttctctactttttaacccccatcccccaccgctgttctctatttgcagtggggggtccagctggaggtggaataaatgcggcaaccacag

SEQ ID NO: 35108 - DNA, 120 bp, Homo sapiens
gtgcgagctaccatgcctggcctgtcgcatacctttttagacaagagtatatgtgggaagaaaactgtatgccctaagaatatccttattatactgatagattgtttaagagtttggctt

SEQ ID NO: 35109 - DNA, 120 bp, Homo sapiens
agtcggtctttaactttttaggaagttaacccatgggtcattagaatctaattatgtaactattaggctgtgatatagaattaattagtatagtctatttcataaggtaaggggaaggat

SEQ ID NO: 35110 - DNA, 120 bp, Homo sapiens
ctgcgtgttctgcactgaggttctgctgaggcctcagtgcagctgtggagcaggagcggcacagaagaaggagctgtggctgcactggcaaagctcatgctcccctcggggagaccagcg

SEQ ID NO: 35111 - DNA, 120 bp, Homo sapiens
gcgcggatcttgtaggaatcactatcgcgagggttgccaggaggcagtggtgcagtgtgacaggaggcgctccaggtggcggcgagggtgcagaaggggagtcccaaccttgccttagag

SEQ ID NO: 35112 - DNA, 120 bp, Homo sapiens
tggcgtggggggacgttagggtgcagtcctcacgctctctgaaggttgcgttgggctgaggggcccttctgacgtgtgggctggtgccggcctctcctgggcctccccgggagtgcttgg

SEQ ID NO: 35113 - DNA, 120 bp, Homo sapiens
tggcgtctcccagggtgcgcggtgagagcaagcgggcaccacagccaggtggaagctctggaagggaccctgagcaggaaggcgcacagctgggcctccaccccgtcctcctcatcagaa

SEQ ID NO: 35114 - DNA, 120 bp, Homo sapiens
ccacggcaccttgttattttaatagtcccctcagatgcttagaacagttggatacctggtgagctggctgtccggatgccgcctttcccggcacgcacagtgtggattctctaatggctg

SEQ ID NO: 35115 - DNA, 120 bp, Homo sapiens
ggtcgtgaggcgctgcgacatgctaagcagtgctgggtgacacagaggactaagataggccttcctttccggaaggtgagggcttagctggagagatgtcatcacacttgaaaggtggat

SEQ ID NO: 35116 - DNA, 120 bp, Homo sapiens
caacgaggaacaaacactttcgcagtagaaacaacaaacatcagaggagctggacggtgtttttgggcctggaacctttcttgggttttatctgcgcagccccagctctgcagcagtgct

SEQ ID NO: 35117 - DNA, 120 bp, Homo sapiens
gctcggtgtgtgcgaggagcttggtgtgtatttgctgaatacaagtacagggccctggagggccagagacacgggtgagcttgtgggcccaccagttgcccagtgtagcagacgggtgtg

SEQ ID NO: 35118 - DNA, 120 bp, Homo sapiens
tgccgatccttgagcattcagtccacaggtgtcgtttctgttcctgatttgttccttggcaggactctagagctgaaagctgctgagccttgtgatgcctcactgtcctcattagaaaaa

SEQ ID NO: 35119 - DNA, 120 bp, Homo sapiens
cctcggctggggagacttgaggttcaggaggtggtgactcatgaggggctgcgggagccgtgcctctcacgcacctgccctggtgctggctgtgagggacccctctgggcccgtggctgt

SEQ ID NO: 35120 - DNA, 120 bp, Homo sapiens
gcccgtggctgtggcatctgctgtgagggaccctctgggcccgtggctgtggcatctgctgtgagggaccctctgggctgtggcatctgcaggggcctctccccagggctgcttctcttc

SEQ ID NO: 35121 - DNA, 120 bp, Homo sapiens
cagcggccgcagaaggagcacagactccctctgtgtgcacagcatttgggacgtgagtctgttgtggctgtttttggaaaatacagtctgacacaagatattttaaacccacagaatatt

SEQ ID NO: 35122 - DNA, 120 bp, Homo sapiens
ctccgcctctcgctaaacacctcctgtcctccacactccaccctccacctctcactaaacacctcctgtcctccacactccaccctctgcctctcactaaacacctcctgtcctccacac

SEQ ID NO: 35123 - DNA, 120 bp, Homo sapiens
ctccgcctctcgctaaacaccccctgccctccacactccaccctccacctctcactaaacacctcctgtcctccacactccaccctccgcctctcgctaaacaccccctgccctccacac

SEQ ID NO: 35124 - DNA, 120 bp, Homo sapiens
gcccgttcccatcctgtcatttctcacttcaaatctcctgccttccacactctcttcctgtcagttctcattaacattttcttccttcttcacacccatcctgtcagtcctcactacaca

SEQ ID NO: 35125 - DNA, 120 bp, Homo sapiens
acacgaatcctatcaattctcactcaacatttcctgtctctcactctcccgttctgtcagttcacatgaaacattctctgccttcctcactcccatacggttggctttcactgtctgttt

SEQ ID NO: 35126 - DNA, 120 bp, Homo sapiens
tcccgccctcccatattctgtcacttctcactcagtattcccggccgtcctgaccctgagtgttcccgggtcatgtcagttcccaatgaacacttcctggcctccattctcactacgcag

SEQ ID NO: 35127 - DNA, 120 bp, Homo sapiens
cctcgcacaaatcctgttgcttctcattcaacactctctgccttcctcactttccttgtgttagttctcaggaacatttccagttctttttccatcaatcctgttttgtctcccaatctt

SEQ ID NO: 35128 - DNA, 120 bp, Homo sapiens
actcggtgggttcatgactgctctttacactgctttgttcatttatgaatgctggatacccagccccctttctcccactgtgatttttagcagtgtatgtggtgtgaaaaacaacattca

SEQ ID NO: 35129 - DNA, 120 bp, Homo sapiens
gaccgtatcgtttttcttgtagttatgatagcgtcatggatctaagcagttatttgcagatatggataagatgaaaaggtaatttttttttggaaaagataatccattgtgaagttttta

SEQ ID NO: 35130 - DNA, 120 bp, Homo sapiens
ggccgttttgctggaagaggatcgcttggcagctgaacccagctggaatcttagggctcaagacagggccctgtattttagtgacagctcatctcagctgaacaccagtctaccattcct

SEQ ID NO: 35131 - DNA, 120 bp, Homo sapiens
atccgtggttatggaacataaaacgggaagcaaagcccaggatctcaaacagaaagtacagttgcatgtaactgtttaatcagttcagacaaactgcatttgcaagaccaaactgaaatt

SEQ ID NO: 35132 - DNA, 120 bp, Homo sapiens
tgtcgggtaccggagggcagccatggtcccggtttttgtggagaaccagcagaggtggtccgtgtggccgtctgcttggtagcaggtgcgggtgtgctgcagggtaaacgtgcttcgggg

SEQ ID NO: 35133 - DNA, 120 bp, Homo sapiens
tgccggggaagaaggctttattctattacaggcggtgtcagctggagagacaggagtcaaaactcaaatccgtcccgccttcccggctaaagtcaggggtttacatagctgggaaggaag

SEQ ID NO: 35134 - DNA, 120 bp, Homo sapiens
gtgcgtgggtggagcacggaggggaggtgcgtgggtggagcacggaggggaggtgcgtgggtggagcacggaggggaggtgcgtgggtggagcacggaggggaggtgcgtgggtggagca

SEQ ID NO: 35135 - DNA, 120 bp, Homo sapiens
gcacggaggggaggtgcatgggtggagcacaggatatttttgggacggtggaacaactctatgatactataatggaggatgtgtgtcattacacatgtagccaaacctacattgacagca

SEQ ID NO: 35136 - DNA, 120 bp, Homo sapiens
atgcgtcacagctgccagacggaggctccccaatggcgacgctctgacaggggtccgtgactctcctcagggagaggtggctgtttccaatgtcctccctggtgccctgtggctggcagg

SEQ ID NO: 35137 - DNA, 120 bp, Homo sapiens
ccccgtccaagctctgttttcatctgaatgcagcagccacgactaacacgccaagtgtgtcctccatgctccagagcctcagatctggtcagagcaagttcttactcagcatgcagatgt

SEQ ID NO: 35138 - DNA, 120 bp, Homo sapiens
tcccgccacgtggaggagtctgcgacattccacacacaatgacagttaaagacacctgctgaccactgggtcctgcttcccctgctcaccaggcatctgtcaggaaacagccggcccctc

SEQ ID NO: 35139 - DNA, 120 bp, Homo sapiens
gcccgacacggtgctcgggcatctggaaggaggaagccggcgtctcagccccgcagaagccccgaaccgtgggcctcccgccgcgtccgacaggcaggggtggggctagatgaccgaggt

SEQ ID NO: 35140 - DNA, 120 bp, Homo sapiens
ctccgtttgcaggaaggactgggcgcgggagccgcggtggaactgcagggcgccctccgagccgttgcgggagaaggaggaaccgcagaccctgtaatcccggctcgcggacggggtcgg

SEQ ID NO: 35141 - DNA, 120 bp, Homo sapiens
caccggcttcgccattttcgcttcagctcgcactgcacctgggaggtgagggcagcgggaacgcccgtgagcctgggcaggtgcgggcggctgctatgggaagcgcggcccgcgagcctc

SEQ ID NO: 35142 - DNA, 120 bp, Homo sapiens
tcccgcctgctcccgtatctgtgttgccagcagatggacagaaacagaaacggccttgggggcagaggctggagggagcgggaactggacggccacaggagggcgggggacgctgccaga

SEQ ID NO: 35143 - DNA, 120 bp, Homo sapiens
gtgcgtgggtggttcggggatcgccactgccgcggtaagcgcagtcccacagtctcagatagttaatatttctctgaaaagattttccttagcagccggggttgtgacggtgctgggcct

SEQ ID NO: 35144 - DNA, 120 bp, Homo sapiens
tgccggaggtcccacccaaggctgcccaagcccaaagacaggcctcctatccatcgaggcccggagagtttcaacccctgcctggggccacacactccttcatgcagagcctggtgtgca

SEQ ID NO: 35145 - DNA, 120 bp, Homo sapiens
gcacgtacctcccctcctccggcatcggccagctccatgcccagaagcgcctggcgcaccgctgtgtttcctacaggtccgctgccctgtgctgcacatcatcctggtgtgctcctccat

SEQ ID NO: 35146 - DNA, 120 bp, Homo sapiens
tagcggattcctttagaacttaaagaacttggagacccaatcgccatccccaggcaccagcgtatctgtgcatttccttcttaacctccttccctggtcccgtatctcctttggccctga

SEQ ID NO: 35147 - DNA, 120 bp, Homo sapiens
tctcgtggcccccgcagcagccacaggcccagctcttgtcccggcccacctcgggatgcttccgccgtactgtgtccatggctgagaccaccctctctgtggccgccttgctgtccccgt

SEQ ID NO: 35148 - DNA, 120 bp, Homo sapiens
actcgatgagccaatgccctcgtggctggcattgagcttggcacctgctgggcctgaggaccatgaggggaggcttccttcagaaaagctgctgctctcagaggtgatttggggcaggcc

SEQ ID NO: 35149 - DNA, 120 bp, Homo sapiens
ggccgctctgggggtctctggcaggctcctcctggcaccctgggaggctggtgtgtccttgcagggttgcaggagggttggcgggatgatcagatggtgcctcccacaaaggcatctgca

SEQ ID NO: 35150 - DNA, 120 bp, Homo sapiens
gaacgagtcactgcggtggcctgagtgctggaggagggcagaggcttatttttagggatgtggcgtaacacggaagaaatgtgtgcacttgaagcatggggaggccgaaatgccaaacag

SEQ ID NO: 35151 - DNA, 120 bp, Homo sapiens
agacgtgctctttatgtaagaacggagttaaccagtatgtaacacagaagacttacgggagccggccccctcgcgtgcccaccacggtgtgctgctgaggccattcccgggaacgccaca

SEQ ID NO: 35152 - DNA, 120 bp, Homo sapiens
ctccgccctggccacctccaccacagaagcaatggcagggctgtgagtgcccagggtgttagagattctactgccttgcccctgcctgaccctgactcaaggagggaggcccccactctg

SEQ ID NO: 35153 - DNA, 120 bp, Homo sapiens
caacgtatgcttttcagtgccttgtttcaagaaacaggcttgaagaggcacctttcagaagctgagcagcaattgtagccagttgggacacacagaccaagatttctgggtctgatccca

SEQ ID NO: 35154 - DNA, 120 bp, Homo sapiens
gggcgggcaacagggctttgtgcaaagtcactcagccatcggtgagtgacagctgggtgggttctcaggcctggactgctgaggccaaggcttctggcctctcgtgtaaggattccaggc

SEQ ID NO: 35155 - DNA, 120 bp, Homo sapiens
gaacgtgctggaaaggcagggtctcagcccccacacagacccactgggccagagcccgcaccacgatcagtcccaggagctcctccgtggcctcttggaagcctgagccctgccggggca

SEQ ID NO: 35156 - DNA, 120 bp, Homo sapiens
aagcggaatccccagcctcacaccagcccggccactgccgctcccgtcctctgcctgagctgttctgttttccacgcagtgggaaccccggcccccatccatcagcacagaagagttgtg

SEQ ID NO: 35157 - DNA, 120 bp, Homo sapiens
ggccgggtggtcgggccccagcacacggctcggggagcctcccacacttggtgatcccgagccctcagtctgctggtggtggtgctcgagaactgtggcttacagtgcgggtgggcaagc

SEQ ID NO: 35158 - DNA, 120 bp, Homo sapiens
aagcggagaggagcagctgtggagggcaaggactggggccattgctccttgatacactgtggatgaaaccctttactcagtgaagacctaagactcccccaggcctgaaagctggtcttg

SEQ ID NO: 35159 - DNA, 120 bp, Homo sapiens
agacgggaagaccttggacagggagactgatccctggctggcttatctgcttcaggatctgactgcagcaggtgagaccccaaataaaggcccagaccatggccacggctggtgcggccc

SEQ ID NO: 35160 - DNA, 120 bp, Homo sapiens
gtccgcagagcccttctcctcccaggggctcccacacccacatctctgctgattccctcacacatgtagccaagtctgtggcttctgtggaggctaattttttttctcgaatttaattaa

SEQ ID NO: 35161 - DNA, 120 bp, Homo sapiens
tttcgaaaacaataaacaataatgattgcacacacaacacccagggcagactttggccctgtgcaagcaggaaacacaactaaaaatgtgaatctgggaagcaagtgggcctgatgggac

SEQ ID NO: 35162 - DNA, 120 bp, Homo sapiens
ggacgaagcgtgagctccgggcaggagaaactctgttcagttcagctcccaggcagccctgcgctcgccggtgggcagagccggcccaggaccgtgcatgtccaccccgtggctgcctgg

SEQ ID NO: 35163 - DNA, 120 bp, Homo sapiens
agccgcctgtgctatgtgctgttgcttcgtcttggaagcgagtccctaaaccaaccaagtattcaaagtattcaacgagcagaaactgcaacaggaagaaaaattattcattttggtttt

SEQ ID NO: 35164 - DNA, 120 bp, Homo sapiens
tctcgcccacttgcaggatgacgaatacttgaaggcctcccttagggcttcagtgcttctcagcgactattccaagccccatgagcctacatcatcctccactgggggatgtgctgatgc

SEQ ID NO: 35165 - DNA, 120 bp, Homo sapiens
gggcggctgagctgctgccctgggtctggctaaaacagtgccatgcagaattggcaggtgggcaccaggagcaactggaaacacagaaagcaagtcaagggagaaaggtcagcacacagc

SEQ ID NO: 35166 - DNA, 120 bp, Homo sapiens
tgtcggagctgcctcctggcccctgagcatggggcatgaacagcagctgctcacagaaggctgtcctcccagtgatgagtcctcgtgcctctcaccctggctccctgcttcctttgttcc

SEQ ID NO: 35167 - DNA, 120 bp, Homo sapiens
gcccgggtgggaagaggacttgcatcccgggtcccactgctgcagggcagggttaggacctggggaaggagctgcccgctgcttctggaaccgctgcagggcagggttaggacctgaagg

SEQ ID NO: 35168 - DNA, 120 bp, Homo sapiens
gcccgctgcttctggaactgctgcagggcagggttaggacccggggaaggagctgcccactgcttctggagctgctgcagggcaggggttaggacctggagaaggagctgcccactgctt

SEQ ID NO: 35169 - DNA, 120 bp, Homo sapiens
tcccgcctggcacagagacacagggcgccagtgtgctggtcactgtgatgatgcacagtgccggacacacgtgatgatgcccagaggccacctgcctagcataggacagacagcccccaa

SEQ ID NO: 35170 - DNA, 120 bp, Homo sapiens
ccacgtgtgttctatgacccagctctccttacaggtcatgggaggagcagccatcacatgtgtagagtgttctgtagaccacagagcaccatgcagacgcaagcctgactttcatttctt

SEQ ID NO: 35171 - DNA, 120 bp, Homo sapiens
gtacgatgccaggtggcttcaccccagccctgctcggcccccagtcgcatccacatctctctaagtatttgcaaaggatgcccatttaatgccccaaagatgaattccatgcggacattc

SEQ ID NO: 35172 - DNA, 120 bp, Homo sapiens
cctcgcatagctcacgtttttgtgatcagttgaaaaagcagaagcatatttcccctgcatttcagatcatctagctgcgactactcaagtgcccagacttggggaaacaccacaagtttc

SEQ ID NO: 35173 - DNA, 120 bp, Homo sapiens
gggcgcctggtgcccagatggcttctgtctggcagaggctggactggattctggtgcttgctaatgtgcaaactaccaggctgctgggtgctttctggaagcctcagaaccatgccatcg

SEQ ID NO: 35174 - DNA, 120 bp, Homo sapiens
actcggggtgagaaagtcaaaatcttcctttcggaatctccttctcctctgtcccaatctcttttccaaaactctgctttaaaacactacagcattattacttcccaaagtctttaccct

SEQ ID NO: 35175 - DNA, 120 bp, Homo sapiens
caccgcatacggagcatgccctgggtgcagaggaggagcctggaagcccagagaaactgcaaattccaggcagcatcaaacctgtgaggcggcagggaggttgggggagtgggttcgata

SEQ ID NO: 35176 - DNA, 120 bp, Homo sapiens
tgacgttcctggaatatgcacagcaatgacttcttttaggacattttagcaatgaaagcagcattaaccgtgataaaacccgttactttccaaggacccgctccgcaaagcgcccaccct

SEQ ID NO: 35177 - DNA, 120 bp, Homo sapiens
cctcgagggaggaaagccgagctgcgcctccgcgcaaggccagggagtgtggctcgagccccgctgcagaccgggcgtcgccggttaatcaatgacactgtcgggtcagcagcgcagcct

SEQ ID NO: 35178 - DNA, 120 bp, Homo sapiens
ctcgggtttttttctttcttttttctttcctttttttttaaggttcacagagggaataattcagaactccatgtgcgaaggcacttaatcaacaaacttatgagcagttagttcctccag

SEQ ID NO: 35179 - DNA, 120 bp, Homo sapiens
actcggccctggccctctgggctctgcatcgcctctggctaccacagttagttcagggttgggcttgtggccttagtggagccaagaaaacataatttctgtgtttggacaggattatag

SEQ ID NO: 35180 - DNA, 120 bp, Homo sapiens
tgccggagttgctgagagaccagcgtgtgaacctggctctgatgacagcggtgttcacggagcagggatccgggagagggagcagataagcagggaggagagatggccctgtcttcatga

SEQ ID NO: 35181 - DNA, 120 bp, Homo sapiens
tgacgccactgcccaggacactagcaccgaccttccagtgactgtcagtgaagccaacgtttgtgtcacctgccacaatgtgtctctactgtgcatcttgctttgtgttcctggtgcctg

SEQ ID NO: 35182 - DNA, 120 bp, Homo sapiens
tctcgcctgcttgcagctgcccgcgggcgccgagcctgatggtcgtgctgctcctctgatgccgaccctgacttctctccaaggctaccacttgtgctcacccacggactgtgtctaatt

SEQ ID NO: 35183 - DNA, 120 bp, Homo sapiens
cttcgctgggtattgctgctgtgttgcccagggaactggggcagacaagggaagctcatagctcctttagtcaaggattctcatgtttccaagaaccaacagagattttgtgtaatttct

SEQ ID NO: 35184 - DNA, 120 bp, Homo sapiens
tcacggggagataaattcaaacatcagttaaaggcagctatattaaatcatttttttctaacctaccaggccaacccttctcatatttgattagtctctcataatactggtctctgtatc

SEQ ID NO: 35185 - DNA, 120 bp, Homo sapiens
ccacgcagaagacccagacgcccccagtagctaccagctagagtgggggctcatctgctcatttccagggccccttacatctggccccgttctcacagttgccttttattagatccctct

SEQ ID NO: 35186 - DNA, 120 bp, Homo sapiens
ccacgtgtgcctttgtcatcgaaatacctgcagttcccaaatacatctggcctcacagggttgttggggcttaaatgtgcaaatacgagtaaagaggtgagagcggagcctgacagcgca

SEQ ID NO: 35187 - DNA, 120 bp, Homo sapiens
aggcggcaaatagctcagtccgcactcaactcccttcccagccgtctggtggaaggtgaggagcaaaagctcatgctgctgaggcctggggccacccaggcaccggcctccccgtgctga

SEQ ID NO: 35188 - DNA, 120 bp, Homo sapiens
ccccgatgcgcacctgccgactttccttctgatgcagacatggtccccactggggcaaggctgcagttttcttttaaaaaacagatctttcaaaataaaaggggccttgaagaaaatcgt

SEQ ID NO: 35189 - DNA, 120 bp, Homo sapiens
aggcggttctggcgaaagtgtcctgagggtggtgtgtgatggacgggactttgggcagtgctgatggggccttgcctgtcacttgaggcctccaggagagtcgaggactggcagatccag

SEQ ID NO: 35190 - DNA, 120 bp, Homo sapiens
cctcgcagtaggttcccacagttctagcctccttgatgccagccccagggtgcccactgctggccaactatgtccttttcctcaaaaccaggtccctcggtgcccagggtgaatgggtat

SEQ ID NO: 35191 - DNA, 120 bp, Homo sapiens
acccggggtctgggacaccgagcagacctctctggcttggagatgtgtgcggtgggaagaacagggtgacctgagctctcccggtgtcacattctccacatctgagccctctttgggtga

SEQ ID NO: 35192 - DNA, 120 bp, Homo sapiens
attcgtcttcaggaataactgacccttgaggccagacagtggctgtgaagagcagggggaccgcctgaccgtgacccccaaggacagacgctggccctcttgacggacgagatgaccagg

SEQ ID NO: 35193 - DNA, 120 bp, Homo sapiens
aggcggcaacatgggggcccacgctgacggcagcatctcacacctggatgtgtttctgtggtccacaggtctgtaggaggtggaactggttaatttaaagtcaggttggggttgttgtta

SEQ ID NO: 35194 - DNA, 120 bp, Homo sapiens
ccacgagaaaccaaggatgagtggtggctgcacccagtctccatccccatgagcaccctgcggggtgttgggacccccaggcccgggccacacacctctctctttcagggccgtctctcc

SEQ ID NO: 35195 - DNA, 120 bp, Homo sapiens
tgccggagctgtctggggttatgtggcttgcctaaggccacaccgattggggcctggcaccaaagtccattagtatttctgtgacagcagccatctttctatgtaagacgcttatttcat

SEQ ID NO: 35196 - DNA, 120 bp, Homo sapiens
atacgaacatcgcctctgtctcgtgctgtgacccggggagagactgtgggcaaaacccagtggcgtccgagggtctgtgtggccccgaactcttagtgctgacagcaacatgaaataatg

SEQ ID NO: 35197 - DNA, 120 bp, Homo sapiens
gttcgtgcatgttaacttgtgtaactagtgcacgttaatcacattaactagccatgttaactagtgacgtagattaataatgatgaatcaataggaatgagtcctgtatactgacggata

SEQ ID NO: 35198 - DNA, 120 bp, Homo sapiens
atccgggcgataggattcttcagcgaggccggggaagaagcagactgtcacctttggtctaaagttggtgggttaagtggtgggaggtgctcagggcaggtggcaggaaggggagagcgt

SEQ ID NO: 35199 - DNA, 120 bp, Homo sapiens
gcccgtggacatcttcctgtgtgcatagcgaggacgggtggccattagagcagtgcagacgggacctgtttccagaagaaggactgaactgaccagatttgcatgatatgtttttattgc

SEQ ID NO: 35200 - DNA, 120 bp, Homo sapiens
ccacggtgtggggtgactttggggtctgtgccaggatgcccccgcctcagccggcttcatgggcatcagagggatcagctctcagtgggtccctccccaggctggggttgggcaggctct

SEQ ID NO: 35201 - DNA, 120 bp, Homo sapiens
ccccggtacccggtgagaagccgggatggagcccgtttacggagcctcgagctgctggcccgcctgaggctggcgttcaggttctgtgcagtgttttggagagaaatgagattcgttgct

SEQ ID NO: 35202 - DNA, 120 bp, Homo sapiens
gcacggcctctgagagtttcaccagcagacctgactgcgcagtggtccagggcactgagcccagccccagtcttgaccatggcctgtcaaacgtggttcctgacagggtagtggctggag

SEQ ID NO: 35203 - DNA, 120 bp, Homo sapiens
agacgctgcctggagggaatgggcacgtgacccggggtgtgagctgtgagctcaggggcagcaagagccatcagaaatggggagggcacgtggcgcttgagtggccatcgctgtggagag

SEQ ID NO: 35204 - DNA, 120 bp, Homo sapiens
ctgcggctgttctcagcactcagggaagagacacggcactcgcgtggcctttgccgtggtgagcgcccacactgccgctgttctcagtgttcagggaggggaagtggcacctgtgtggcc

SEQ ID NO: 35205 - DNA, 120 bp, Homo sapiens
actcgtgtggccttcgctgtgctgtgtccccacactgccgctgttctcagtgttcagggaggggaagtggcacctgtgtggctctggccatggtgagtccccacactgccgctgttctcg

SEQ ID NO: 35206 - DNA, 120 bp, Homo sapiens
gctcggggaggggacgtggcactcttgtggcccttgccgtggtgagcccccacgccactgctgtcctgagcactcacagcattgcccccatgtagtcctaagggtggtcctggatgaggc

SEQ ID NO: 35207 - DNA, 120 bp, Homo sapiens
aggcgtgtcacccccattctgcaggagcagccgagtttctggcaggtcacatgaggcaccaccgtactcaccaggaccctggaaaggaggcgggacaggcgtccacgtcctgagccccat

SEQ ID NO: 35208 - DNA, 120 bp, Homo sapiens
caccgcaggaggccgagcacactgccctgaggtcgcgtcggagcccgtcgacggtttctgtggctgcgccgggcttgggatccatctccctcctgcctggggccagtaccagctcctccc

SEQ ID NO: 35209 - DNA, 120 bp, Homo sapiens
tctcgtctgcgccctcccccgtgctcctggccttcctggaggattcagtgtcctcgggaagcatccacggcacccccaggccccccacgaagcccgctgtcctcacgctgaccctccctc

SEQ ID NO: 35210 - DNA, 120 bp, Homo sapiens
agccgccacctgagacctcggttcctctgggtcagttcttcccgtctgaagggagtatcctgagctttcttccaccaaacctacaaacccatctgcaggcagctcccccatcccgccatc

SEQ ID NO: 35211 - DNA, 120 bp, Homo sapiens
ccccgagctccacgccctcagcacacgcgcgtgccctccagccacgtggaggagccgtgaggtccctggagcgtctccgtcatcccaggctggctgggttccgtcttccttccatgacat

SEQ ID NO: 35212 - DNA, 120 bp, Homo sapiens
ggccgtccccctgctccacatcccacgtcactccaccagatacctctcagatcctcagatatttcttggatttttccatttttccatcttcctccaaaccaccaccgtctcctgcagctg

SEQ ID NO: 35213 - DNA, 120 bp, Homo sapiens
tgccgcagccccagcctctcccacctccagtgtccaccgttggctccagggcagcaacagcagccagggacaatctgtgtggggccctcatgccctgctgccccacgctggccgcccttc

SEQ ID NO: 35214 - DNA, 120 bp, Homo sapiens
tgccgtcctctgtggggccggggccagccctgcccctcgctccgagagcagctcaaatgttagctccctagggaggctgctcctgagctgcgcccagggcccccgccccgcttccctctt

SEQ ID NO: 35215 - DNA, 120 bp, Homo sapiens
caccggagcagtcgcatatgccaccccaccacgttccatttacgtctgtgccggcagggatgcccggctcttgttcgggcccgtgatgttgacgtgtgaccagtccctggtgtggccccg

SEQ ID NO: 35216 - DNA, 120 bp, Homo sapiens
ccccgcgtggcccggacctaccggtccacagcgcgtgacaatctcccatctcgggcgacctggaggccctcgctgtggccagcttagctcccggggctgccccaggccgaggccagcccc

SEQ ID NO: 35217 - DNA, 120 bp, Homo sapiens
ccccggagcccccttccttctccaccagcaaaaaggaaatcccgaggtggtgggaggagggtcccattgggagttcttgagcctcctggtggccaaagctggagggaggctactggaggc

SEQ ID NO: 35218 - DNA, 120 bp, Homo sapiens
cagcgagtccttgcggagcggcgggagctgcctcgcatgagacaggtgctttcagccccaggtctccccaaagtcaccctgctcaggttgcttgtagctccccagaaacgcgggcgggag

SEQ ID NO: 35219 - DNA, 120 bp, Homo sapiens
ccccgttcttaggcaggggcaggggggtgcgtgggtgtgtgtggtcgtgcaggggtatgtaggggtgtgtcggggggtgtctgtgggtgtgtaaatgtaggttggtgtttgttggtgtgt

SEQ ID NO: 35220 - DNA, 120 bp, Homo sapiens
ggccgtcccgtcgagattaggcccttgtgtctgtgggtgtgtaggtgtgtgttgtgtgtactgtagggtgtggtgtgtgtaggtgtgtatgggtatgtacatgactgtggggtgtgtgct

SEQ ID NO: 35221 - DNA, 120 bp, Homo sapiens
atacgtgtgtgtccaggtaagcacacctggccgtcccttctaggagtcaggccctgtgtctgtgggtgcatgtgtgtgagtgtatgtaggtgtgtgtgatgtgtagtgtgtgggtgtggt

SEQ ID NO: 35222 - DNA, 120 bp, Homo sapiens
atacgtgtgtgtccaggtaagcacacctggccgtcccttctaggggtcaggcccttgggtctgtggtcagcatggagagatctaccccagtactcaaccctgaatatcaggcagagaatc

SEQ ID NO: 35223 - DNA, 120 bp, Homo sapiens
aggcgagagcttcactgcagaaaactcaaacttcccaggcagagtgggacccctggaccatgcccagaggacccggattgcagccaagagccctcgtccgcacaggagaagaaggggcgt

SEQ ID NO: 35224 - DNA, 120 bp, Homo sapiens
agtcggggggcacgcagctgaagctcatcatgaccttccagaattacgggcaagcgctgttcaaacccatgaagtaagtgccgaggcctgtgggctggggcgtgaggagctggagctgca

SEQ ID NO: 35225 - DNA, 120 bp, Homo sapiens
aggcgagcaggcgccgggcttctgctggggatggccgtgtctcctcccagggtgttttggggagactgtgggtgaccactctcaactctccccgtcatggcaaacgagcaacagaggtgg

SEQ ID NO: 35226 - DNA, 120 bp, Homo sapiens
ccacggcctccccacctcctccctttttataggacggaaaacctactgctggttattcttaccctgtgagaataagcatttgtattttaaacaagtaacctggaatgtgaacaccaaaga

SEQ ID NO: 35227 - DNA, 120 bp, Homo sapiens
tgacgtccgcaccttcccagcaggcctccggagcccgcacacctttgctacaaagggccggacgcagctatttcaggctttgcaggtgtatggtctctccctactattcagcgggtggtc

SEQ ID NO: 35228 - DNA, 120 bp, Homo sapiens
agacgcagtacgtggtgatgggggaggctgagttctaataagtcttcatttatgcaacaaaatgggctggatgtggtccagtggacagtgtgccctgatctggataaaatagaaactgtg

SEQ ID NO: 35229 - DNA, 120 bp, Homo sapiens
aaccgataacacagcgctccgtggcacgcgacagctcgtggtgaggggtgtgtggacacctggccaccccaggaaggctgctgggctgggtggggtctgtggcaggcgtcccacaggaag

SEQ ID NO: 35230 - DNA, 120 bp, Homo sapiens
cagcggcctgtcagctcactagatcttggccatctggcctgatttccaactttctagagaagccagaaatatggatttttttttcctgttttaatcttggtggtaactaattcagaagct

SEQ ID NO: 35231 - DNA, 120 bp, Homo sapiens
gctcggtttctgggcctctcatttctctggacagatgtcctggagggactcgaccgagggaggtggccctgccccggtcttcccccaagacccacgagtcctgcctcagacccggggctg

SEQ ID NO: 35232 - DNA, 120 bp, Homo sapiens
ggccgtgggtggtacacatctttaaccccccataagaaacgttccgggaacacggagaattgtggccacagctttctgagaacagcgtgggaggacgggagccacgggctggtgtgtaat

SEQ ID NO: 35233 - DNA, 120 bp, Homo sapiens
tgacggcctgtgacccagacgtggtccccccgaagggacgtggacatgacatacaggacctgtgccccaccccgctgttcgtgtggcgatgatgtcggcccgtggcagggccaggatgct

SEQ ID NO: 35234 - DNA, 120 bp, Homo sapiens
gggcggacctccgctgcgtatatggaaggaaggacccggccggggaagccgagggctgggaaagtgaccggggcggcgtctgtagtctgcattgctggagtgttggagcccagacggaac

SEQ ID NO: 35235 - DNA, 120 bp, Homo sapiens
gggcgtgcgagctggggattcccgccagctctggtttccagcacctggaaaggtcaccagagtttgaatctggtaaattcttcctggattgggggctgagttccctccctgggcctggca

SEQ ID NO: 35236 - DNA, 120 bp, Homo sapiens
ggacgggctctccttccagtggaggcaggggccagccttggtggaggaagcctgggttggaggctgagttccctccctgggcctggcctgggtggacgccctgggacaggctctccctcc

SEQ ID NO: 35237 - DNA, 120 bp, Homo sapiens
ggccggccttggtgggggaagcatggcaggggccggccttggtggaggaagcatgcttacacgcttacacgcttacgcgcttacacacttatgctcagacacgaccttgacaattcctcc

SEQ ID NO: 35238 - DNA, 120 bp, Homo sapiens
ccacgtttccaccatgaccacatcggtcaaacacttgcgtggaccggcacctcacagggccctgcggctaggctccccttcccctggagtattggcctgagatacaggagccctatggtg

SEQ ID NO: 35239 - DNA, 120 bp, Homo sapiens
gggcggtgcccacattgcccttcttgggctcttactgtgggaggcgtccacggcagagccaaggggtcctggaggccgtgggggagactcggaaaccagagggtgggcggtgccagggtg

SEQ ID NO: 35240 - DNA, 120 bp, Homo sapiens
aaccggggctgagccaggcctgggacaccgagcccagcctctcccctgcggtgtgactgtgggtcccagggtggacgtgccggggcccccagccagtgcaggagaggcctttgagcagct

SEQ ID NO: 35241 - DNA, 120 bp, Homo sapiens
ctccggcctccgtcgcaagggcctgcgctgctctgagggcccgtcggcagctgggtcagggccacggggagctgggacccccggcctccgtcgcacgtgcctgcgctgctctgagggccc

SEQ ID NO: 35242 - DNA, 120 bp, Homo sapiens
gcccgtcggcagctgggtgcccagggtcccgaaggctcagggtggccctgaggaggctggagctccaccgcatttttcatatgaggaacccagcacgtcccgcctgcctccggcccctgg

SEQ ID NO: 35243 - DNA, 120 bp, Homo sapiens
aaccgtttctgtttctgtcttgttttctcagacaaacgagggagcaggagacaccccctgactttttttatttctctgactacgagaggcacaatgcggagattgctgccttccacctgg

SEQ ID NO: 35244 - DNA, 120 bp, Homo sapiens
atccgcgctcccgtgcgctcagacccaccggtgagtgaggccgtcctgcactggacacagcaggacgtcatcgtcaccttcgtcaccatcaggcagcgccggtgcctgctctccccccac

SEQ ID NO: 35245 - DNA, 120 bp, Homo sapiens
cagcgccgaccagcagcgggcacaggacagagaagaggaagtgaggaaatggaagaagagggttgacctgagctgaaggacatgaacttccacgtgaaatagccccagggccgggcacag

SEQ ID NO: 35246 - DNA, 120 bp, Homo sapiens
tcccggtttccagcagaataaaaggaaggtcagcagaaaggccaggacggcctgaaggaacttcagggctgggactgtggggtggagccgtcccttccggatgccgagcgaacggacctc

SEQ ID NO: 35247 - DNA, 120 bp, Homo sapiens
ccccgcaaaagcacaggggtgaggggatgaagtcatgttccacacacaggatttagacacggctcatggcccatgcacccgaaaccaggatgtgcatcgaggagaaggaggaatggggca

SEQ ID NO: 35248 - DNA, 120 bp, Homo sapiens
gggcggcagaggccccggggtgctgacgagaggagccccgagggggacatggagacaggagcaagaggaccctgcagagaggggcgggtgcccgcccagaagaacaagccaggggaagag

SEQ ID NO: 35249 - DNA, 120 bp, Homo sapiens
gcacggccaggacgccgtggctcagccttgagtgcggccacagacacatcgtaacaggagcacccaacgtcatttttccatcaagaagaagaaggcgatatcaccgtattggggaaggga

SEQ ID NO: 35250 - DNA, 120 bp, Homo sapiens
tgacgtaagcctgttatttggaaacacggaggtaaatacaaaaaccaaacacgcccagcaaaacaaggaaggtgattttctctgggtctttgccaggggcaggaggggtaggaggggcag

SEQ ID NO: 35251 - DNA, 120 bp, Homo sapiens
ttgcggtgctatttcagactttttaagcactattcactggtttgatacaaagtcagaatgcagtttgacacccactagccgggccagagctgacagcctcctggggaggggtcagcccag

SEQ ID NO: 35252 - DNA, 120 bp, Homo sapiens
ccacggcagccctggtgcacacccacagtgagacctgagttcatcttttacctgctttgctcctcacagttactcgggggtaggaattgtggccccgtgtgcccacgtcatagttgtgta

SEQ ID NO: 35253 - DNA, 120 bp, Homo sapiens
aaccggggcttagacagtgggtcgactttctggagctcaatacggatagtgcctgcatgtggaccccgcccggacagccgccctcttcccacctacccgttaacacccatgctgcatgca

SEQ ID NO: 35254 - DNA, 120 bp, Homo sapiens
acccgcagaaacaggtggtgcagagagggggcggggggatgagaccaagggctgaggaacaaaatgaagaaaaagggctttcaattaagttctttcccttggtgcaggctgcttcccacg

SEQ ID NO: 35255 - DNA, 120 bp, Homo sapiens
gtccgcaagtaggacagtgtcttgccagagaggccgacgagaagcgtgggggttgaaattcaaacatgattttttacaaaccaggggaaaacctgggatttcacttcacagaattgagag

SEQ ID NO: 35256 - DNA, 120 bp, Homo sapiens
tggcgctgggacccccgcccctgagccatcggggccgcgcacctggcagagaccacagagctgaaggtgggcaccacttttctctgaattaaagtaaatgaatgaagaaataaataaata

SEQ ID NO: 35257 - DNA, 120 bp, Homo sapiens
attcgtgtgtggcctggccctctagggccatgggacaagatctgaagaacaggctgctggggaatgcgggtggtgggcacagcccagccaggatgcagaagcctgctctgaacacagagg

SEQ ID NO: 35258 - DNA, 120 bp, Homo sapiens
acacggcccaccccagcccacagcccacagccgagtccggctgcagaagcctgctctggacacagaggacacggcccaccccagcccacagcccacagccgagtccggttgcagaagcct

SEQ ID NO: 35259 - DNA, 120 bp, Homo sapiens
gcccgagaccacgtcacagaagggcagggttcctggccctcccagggagctccctggaggcacctgcgccgtcctcacctgggagtgagctccatatgcagattcccgggccaggtcccc

SEQ ID NO: 35260 - DNA, 120 bp, Homo sapiens
taccgagggtcctggatgcaggggctcccaggctgtccttttgggactcacggctcagcccttccccacctcctggggggacctccccggagtaccctgactgcacagacaccctcggca

SEQ ID NO: 35261 - DNA, 120 bp, Homo sapiens
gtccgttccacagaacccccaagccactgtcccccaggagggccttcaccagggcagacgacaagagaaggttccagaagcctctgcctgcccaggtgggcctgagaggggcgaggaaga

SEQ ID NO: 35262 - DNA, 120 bp, Homo sapiens
gcacgggtctcactttggatttgccaaaatcaggacttaaggcaacggttcggtggaggatgtgctttgggaggtggtctcagaagcacagggaaggtgtgggttgaagacccacagagg

SEQ ID NO: 35263 - DNA, 120 bp, Homo sapiens
caccgtgctggcaacccctgaggagctgttgtgaaacacacctcgacgccaccctatggagggacaggaatcccggggcatctccaggactggcatctgtcactggcctgaggttgcccc

SEQ ID NO: 35264 - DNA, 120 bp, Homo sapiens
aaacgtttccagccccctatgcgaagctgcagtggcatacagggacctgagagaggcgtcagtcagggtgcacgggagccgtccgatgcacctgcaagtggactgaaaggggacccaagg

SEQ ID NO: 35265 - DNA, 120 bp, Homo sapiens
ggccgtgggtcagtaggcttagtgtctattaaagcaacaaatccctctgagggaggaacggcaccatctgtgtggcacccctctacgcggcacacgggagggtgcagtgagtgtgccatg

SEQ ID NO: 35266 - DNA, 120 bp, Homo sapiens
tagcgaccttgcccgagggttactgaggaacagggaaaaggctgtgtgaggctcctgggcatctcatcggaatacattaccgtgcacagcagggcttaacgcaacagaagggcgtctgaa

SEQ ID NO: 35267 - DNA, 120 bp, Homo sapiens
ggccggcagggtgggtccccctgagggccacgagggagcgtcggctccaggcccctcccgcctccggtgctggccgcggtccttgccactccttgtcttctggccatgccactcggatct

SEQ ID NO: 35268 - DNA, 120 bp, Homo sapiens
attcgagggtttgggtgggcacgaattttgaggggataccgtccgatccggtgcagggactttccagccgcaggctctagggaaggctctgtgctaaaatgcatccccggttcacactgc

SEQ ID NO: 35269 - DNA, 120 bp, Homo sapiens
gtgcgggcggaaggagccatgctgttgaggggcctgggtaactgtataacctgagggtctccatgttttccggcctgcgtgggtgcctcttccacgtgagctctcccacccccccactcc

SEQ ID NO: 35270 - DNA, 120 bp, Homo sapiens
gggcgtcccctcaaattgtcatctctcaccaccctggactcttcagggcaaaccgagcactgcttaatggaaacattgtttcttcagaggtgacaattcccccacaccagcgtcgtctcc

SEQ ID NO: 35271 - DNA, 120 bp, Homo sapiens
agtcgaagtggggttcctgggcctgcagctccagcatcacagggctccgccccgacctcctaaatcacaagaccctcaggcgattcctgcatttgacaatgtgtgagaagcaccggcctg

SEQ ID NO: 35272 - DNA, 120 bp, Homo sapiens
caacggacaaattctcccccggcatccacgcttgtcccccggcatccacgcctgaccctagtggtcttcatctggtccagagctgcccgaggagacaggacagaatgcagcagtaaggac

SEQ ID NO: 35273 - DNA, 120 bp, Homo sapiens
cttcgagagtgatttagctattcccagttctttgactttcaacataaattgtagagtcagttttccatgaaccaccacaaacaattgcagaagtctggctatggagtacgtgagatgcct

SEQ ID NO: 35274 - DNA, 120 bp, Homo sapiens
tctcggttcatgaatacagttatttaaggaaccattcacttgagtcttctcaaatgtctctcagccatgtttttttacatcagcttcctctataaaaatcttacacattgtttgttcttc

SEQ ID NO: 35275 - DNA, 120 bp, Homo sapiens
cttcgaacacacataaccgtatcctccgtgactgtcagaagttgtatttcttcctttccgatctcgttagctttcatttccttttcctgccttggcccggacctgcggaaggacgctggt

SEQ ID NO: 35276 - DNA, 120 bp, Homo sapiens
gaacgcaccgccccttggtcccgatatcaaagcaaaagcttccgggggtgcttctgctgtgggtgtttgcacatttatcaggttagggaggcgctgctgttcctacttgaagtatctttt

SEQ ID NO: 35277 - DNA, 120 bp, Homo sapiens
ggacgttgacttttatcaaacattcttttctcatttgttgaaatgactgtaagatttttcccttaaacctgttggtgtggaggattctattcattgccattgtgacactgaaccacttct

SEQ ID NO: 35278 - DNA, 120 bp, Homo sapiens
acacggcagccacgaggtgcgatcccgtccacgcgctcagccgttgagcctcactgccatgttttaggagctgttatctcccttctgtgtcaagggcctctcgccccctgagatgggatg

SEQ ID NO: 35279 - DNA, 120 bp, Homo sapiens
tgacgggttaaagatagtgttatttgtttcttgaatatattgataaacatcaccagcgagggcatttgaacctggaatttgttttgttttgagacagggtctggctctgtcacccaggct

SEQ ID NO: 35280 - DNA, 120 bp, Homo sapiens
ccacgtatgtccagggtggaggccacacagccccctggcccacagcaccctcctggccgtggccatgccccttcaccaccccaggaccacactattgacctgagtgcagctccctgagcg

SEQ ID NO: 35281 - DNA, 120 bp, Homo sapiens
tgacgggggagtccacctgctgagggaagtgaggggagtctgtgggacgcccagctctccaaggcatggcaggagctccggacttgctttcgcttcccgcctctcaggccctgggcctga

SEQ ID NO: 35282 - DNA, 120 bp, Homo sapiens
ggccgttcccctctgaggccgagcctggcccccccagagcatctgtctctgagtctgtgcctgtccctctgcgaaggtgaagtccagacagctttgaagcccccatgcccccatcctcgg

SEQ ID NO: 35283 - DNA, 120 bp, Homo sapiens
gcccgggaccaaagacgaggcaggagccagctgtcagagtctctggaacccagcaggagagggtaagggctggactaccagctggtgttttgaaagaatgaagacctgcagctccagggg

SEQ ID NO: 35284 - DNA, 120 bp, Homo sapiens
agccgccgagcctccaccccctcaccagaaaccccttgggctgcgggccaccgcctgactctccctccctcctccagaccaccctggtactcactcaacctgccttcgccaagagctggg

SEQ ID NO: 35285 - DNA, 120 bp, Homo sapiens
gggcggggaatcttttgcatgaccggccctgggcctgactcctctggtgcaggaagaagcagatccagcaagggggtcctcccatccctggtggggccaaaccttctccaacaagccctc

SEQ ID NO: 35286 - DNA, 120 bp, Homo sapiens
gtacggaggcttcctttgaatgtcgaggttttccaaagatcaaaacagaaagcaaggtattttggaaacacctcatgtgccaactaattaagtgtctggctgttagcaagcccctcacag

SEQ ID NO: 35287 - DNA, 120 bp, Homo sapiens
agccggatcctcagccaccctccatagaagtcagataaggagagagtttctcatcagaaaagtacaggcaagaaaaccaaaaatagacaaatggaattgcatcaaacctaggagtctctg

SEQ ID NO: 35288 - DNA, 120 bp, Homo sapiens
gagcgggaaggctctgggccaggcgcgtggcctgggagggtctgcaggagctgactctggaagttggaggcccggaggctctctccacgtcagttcctgtcttaacttccagtagcccca

SEQ ID NO: 35289 - DNA, 120 bp, Homo sapiens
ccacggacaagcctggggtgtccggggccctgggactgaagatgcagccctgcccaggacaggcaaaacctcctcagccctctcagtcccagctcccctcagtcacccctgcagcctcac

SEQ ID NO: 35290 - DNA, 120 bp, Homo sapiens
caccggggacggaacgcccaggccaggtttcaggctgggattaagggtcctccagaccctccttgaattttaggagaagcacgaaggggtgggggcgtctctctcttctcttaggagatc

SEQ ID NO: 35291 - DNA, 120 bp, Homo sapiens
cttcgggcactgcactgtggcctccacgacaagccgaggaacaaggccgtccacccctgagaaggccacgcagaccactcaccgagggtcctgggggctatggacagaatgtttgtgccc

SEQ ID NO: 35292 - DNA, 120 bp, Homo sapiens
gagcggggccttggggaagcgatgaggtgaagccccgtggatgggttagtgcccttacaaaggagggctccaagagcttcctcacccctgtcccatgtaaggacacagccagaaggcacc

SEQ ID NO: 35293 - DNA, 120 bp, Homo sapiens
agacgctgaacctgccgccgcctggtgtccacttccagcctctggagctgtgagggatgaatttcggccgcttatgagctgcctggtgcagagttttctgttccagcagccgggagggac

SEQ ID NO: 35294 - DNA, 120 bp, Homo sapiens
agacgaggtcccacaaactccatgtggagatggccccattgggggctgtgtggccactctgggcccagaacacaccccctgcctggcccccggcttccgtctgggaccctcctcgacctc

SEQ ID NO: 35295 - DNA, 120 bp, Homo sapiens
atccggcctacgagaggaccagtgatggccaacagtgagcaggaggccctggggacccacacacactgcccaggctgtcctcaagaaacactgggagagctgcacatctttaagcctggc

SEQ ID NO: 35296 - DNA, 120 bp, Homo sapiens
acacgtggaatgtgggtgcctccctgcagcagaaaccatcccagagggcagcaggacagagagggaggcaggtgcaaccgtggctgagcgtccaagtccctggatcagaccagacctgaa

SEQ ID NO: 35297 - DNA, 120 bp, Homo sapiens
agccgcacgttcccccagactttgcagccctgtgacccatgcgttctcgctgagatggagggagtttccttcacttgcagcccagagagacccagcatcgggagccgcccacccctgccc

SEQ ID NO: 35298 - DNA, 120 bp, Homo sapiens
tcccgccctgcaggatgcccctcaacctcctcctggcatgcacggtggccagtgacgccatgcccacactccaccccccagagaacacacttcctttctcgctgtctacaccgcccttag

SEQ ID NO: 35299 - DNA, 120 bp, Homo sapiens
acccggacccatgggactcaggctgaactctctccagcacagctgcaagaccctgagttctaggagaagcagcccagacctgcagccccatgggcagccggcactggacatcctacccca

SEQ ID NO: 35300 - DNA, 120 bp, Homo sapiens
gctcggggctgggaggggagaaggggggcctgggaggaggcaaggtgtctgtgccagagactggtctttgcaccgaggctgctgacaggtggtgtcagggaacctgggtgcacgtcagca

SEQ ID NO: 35301 - DNA, 120 bp, Homo sapiens
ctccgagtctggcacatgctggctggagaccggcagcacccggatggggaagagcagccgtttggagtcagcattgacagaaaatcgaacactgctgctcgaggattcagaagcggccct

SEQ ID NO: 35302 - DNA, 120 bp, Homo sapiens
gcacgccgcgggctctggagagattggctgggtcgtcccccaccttcctggggcaagggacctgccgaagagagccggggaagaatgtcaacattgttaggaaaacaagcttcagacaga

SEQ ID NO: 35303 - DNA, 120 bp, Homo sapiens
tagcggccacccggagggaggtggaattttgcaatgcgcccctccccgtgcagggcgagtggccccagggcacacgaaggccctggctgccgtgagttgatttaaagctcggctgcctat

SEQ ID NO: 35304 - DNA, 120 bp, Homo sapiens
gcacgtagtaatttccacctccctccatgtcacacagaagacacgtttttaccctgagtcggagcaggagaagtgtctaaacgaaagtgacttcacaaagggcttgactgacaggcgggc

SEQ ID NO: 35305 - DNA, 120 bp, Homo sapiens
gggcgcggggagagccgggataatgtccgggttatcaaagcagacgcaggtgggcaggtgagaacgggcatgctccccagctcagaaaggcccgttcggctcgcaggaggtcccaaagca

SEQ ID NO: 35306 - DNA, 120 bp, Homo sapiens
gatcgctggccccgtgcgtttccctttaaacactgtctaagctgtaacgaagtctgattacagtttagctgagatggaaactgagaggaaggaactataatattcagcaattacaatcac

SEQ ID NO: 35307 - DNA, 120 bp, Homo sapiens
cctcggcttatgcctgttccccgtggatcctgactacacaccctaacctcatgcttggcagttcgtaaacaagatgccgctctgtggtgacggcgtacgcgaaatgagaagcacgactct

SEQ ID NO: 35308 - DNA, 120 bp, Homo sapiens
tctcggtagctcccaggcttagtctctgcgctacctgggccgaaagagctgaattctgcgaagctctgtgtccttgcctgtagaagggggaagaacggaacttacttggaagacttgtgt

SEQ ID NO: 35309 - DNA, 120 bp, Homo sapiens
actcgggtgaggattcagctgtgcacacacaaagggacatgagtgagcaagcgtctggcacggacacagccgggtgtggaacagcagccccgccccgttggctcagaggcagccgcacgc

SEQ ID NO: 35310 - DNA, 120 bp, Homo sapiens
gcccgtccacctggccctctgggagggccgccccccttgcttctctggccaaattcctacatctggggtctcgaggggaagaggccgggatgagttgctgggtggcccagcaataaatct

SEQ ID NO: 35311 - DNA, 120 bp, Homo sapiens
ggccgtgggaggtgaatgagtcagtgtttgtgaaacactctgtggatcagatgaaagggctccaggaggggctgcccattagaggtgatcacagggagcttggcccacgccccccagaat

SEQ ID NO: 35312 - DNA, 120 bp, Homo sapiens
gggcgggggcggcaggaggcctggacgcagaggaggccacagccaggccccactaagccacctgttcccggcacaggcatccgagggccaaggctgcaggaaccgtctctgctggtcacg

SEQ ID NO: 35313 - DNA, 120 bp, Homo sapiens
ccccgtgcacgtccgtgcgatgatgccgcccacaaccaccgagatcggccggagggaaataaggccggaggcagcagcacccggggtggggcctggcgtggcccggaccacgtaacctcc

SEQ ID NO: 35314 - DNA, 120 bp, Homo sapiens
ctgcgcttggacagcttctcccacctacccgggtctcagcaccctcagtggtctgcggggagcctgctgccatgcaagtccctataatctgagggtgtggacgcccttttctgccaccat

SEQ ID NO: 35315 - DNA, 120 bp, Homo sapiens
agtcgggggccgtgcctgagagtgggtgagggggacctccccagcccctggagaccctggcttgcccaggccatgtggcccagtggacacaacagaaccagaggccagatccaccccggt

SEQ ID NO: 35316 - DNA, 120 bp, Homo sapiens
caccgaccgagggccccacactgtgcaccacggcgacccctccccaaggccccaccctgccccatccaggccctcccatctctatctccagcctgggggtctctgcctctctctgacctg

SEQ ID NO: 35317 - DNA, 120 bp, Homo sapiens
tcacggaaggtggagagctgtgccagccacagcggcccccagccccttgcatccacggagcacctggggcacgtcctggtgagaccagccacaggtgggagggagtcagcgccgactcat

SEQ ID NO: 35318 - DNA, 120 bp, Homo sapiens
gaccgagctctcaccagcaatttctacattgactgcacattgcaatgacaatgtttgggtgatggagttaaaatataggctcaaactaaatattacctttttttacatgttttcaggcag

SEQ ID NO: 35319 - DNA, 120 bp, Homo sapiens
tgccgggcagctctgacctagaacagccaccttgttttacggctgaggacaggagggctgagaaggaaagccctgtccctgcaggggctaatgaatgagaggagggagaatgagctaccc

SEQ ID NO: 35320 - DNA, 120 bp, Homo sapiens
ccccgggaagaatcaaattccggaggcaggtgacctctggggcaggctgcaaggacgcgggcctagggaatggctgccttcttctctgggtttttctttaaaccgcactgctcagcccag

SEQ ID NO: 35321 - DNA, 120 bp, Homo sapiens
cctcgccatgggcacacgctgaggcaggtggcggcgcccgcctggccattggcagacgtggctgtgctaggcgccttttctttctcagcaggacccggggtgaggaaagagacatgccgg

SEQ ID NO: 35322 - DNA, 120 bp, Homo sapiens
aaacgctggattcagcggaggcgtccacctgcccagccgctccccccggaacttcctccttcagtccggggaccgcatccagcttctccggggcccgcgtgaaacaggctcgcccctcac

SEQ ID NO: 35323 - DNA, 120 bp, Homo sapiens
acccggcagccacccagagtcccggcttatccatcactgtcaggctccgagagcagctctgttctgaatgcccggccgcttctgcaacacacaggagggaacaggggtccacgtgagacc

SEQ ID NO: 35324 - DNA, 120 bp, Homo sapiens
gaccggccactggcagaggcctgggtcaggctgaaaggtgccttgcgagatgggcactcgccagcctgctccagccagagcccagttccttctgagaatcacacggccagacagaggctt

SEQ ID NO: 35325 - DNA, 120 bp, Homo sapiens
gcacggaagcgaagccggccccagcgtgactgagtccagagcccagccctgagcactcaccaagggccaggacgagtcagtgtgtggggcaggtgccgcccccacgacctcattcccaag

SEQ ID NO: 35326 - DNA, 120 bp, Homo sapiens
ccccgcagcccgtgctggccagggaggcaggagggcatggcaggtgctcccagagctcgcttctctgcgcgttcccgccgccctccctccctggtcctgcgggctgccggcctcaggatc

SEQ ID NO: 35327 - DNA, 120 bp, Homo sapiens
agccgtgccccacctgccttcactggctcatgttgactccttcatctacgagacagtctgagcttgaggcttggaaactctcctctgccggacctagctctgggccatggatgcacagag

SEQ ID NO: 35328 - DNA, 120 bp, Homo sapiens
ggacggtccctgaccccaggagctccctctcctcccacgccttccacagacccatctccctcaggactgccttaacttggggtcacctagaaataggtttatggggaggccatcccaggg

SEQ ID NO: 35329 - DNA, 120 bp, Homo sapiens
tttcgcaggaatgagggctgagatggggaagggctgttgtcaccaccatgggggattgctccagtgagagggccagcacgggaccctcagagtcttcccacccaagggtcatgagatccg

SEQ ID NO: 35330 - DNA, 120 bp, Homo sapiens
tgccgatgccaatggctggaggtcagctggcactcccaccacgatggccagcggacaacaacagtgtgggcacagtgatgggcacccccccgtgtccactcggccgggctgcagtgccca

SEQ ID NO: 35331 - DNA, 120 bp, Homo sapiens
cagcggcacggtcaagccccatccagatgccactgtggctgtgctgcaggtgtgatggacacgcacaattggctaattgcaagtgctgcagatcacgagatgtggctgggcctcagctgc

SEQ ID NO: 35332 - DNA, 120 bp, Homo sapiens
gaacgccgaggcttcctggagaaggatttctgccccaagactgcaacataaaatcctgcccgggctcccagcctgctcccctgcgggtctgccctgcagatttcagattcatcagcctgg

SEQ ID NO: 35333 - DNA, 120 bp, Homo sapiens
cagcgcattaaatcaatctccctgtgtctgtgtctctgtctctctccctccaaagggcgctgactgatacgggaccctctgtgtctctgcctcagggccaggctccagcccccgagagcc

SEQ ID NO: 35334 - DNA, 120 bp, Homo sapiens
ccacgaggacgctttcggcccttggtgctctctgtgttacggatttatagggctgtgccctgggcctggacctaagggggtcgggagcaatgtctggacttcctgccaccctcaaggtac

SEQ ID NO: 35335 - DNA, 120 bp, Homo sapiens
ccccgaggcagcccttaccctcccttgacctttgaaacagggtctttgaccccactggtgggctctgagaaatatttcccctttccttccacccacttccccaccaggaggctgcacctg

SEQ ID NO: 35336 - DNA, 120 bp, Homo sapiens
tgacgttctagggacattcactaccctttgcatgagacggaggcacacgcagagacccagaacctgggccgtcagctaagggtcagctcaaagcttcccaggtcccagataccaaagggt

SEQ ID NO: 35337 - DNA, 120 bp, Homo sapiens
ccccggcctcacagcctccgagcccagctctgcagaggtggcgcgcccagcgggagctgtaaacgggatgtgtctttagccttgctgccaactcttgagaagcacgccccagaggcacag

SEQ ID NO: 35338 - DNA, 120 bp, Homo sapiens
ctgcgagctcagccttgtgtcttgacccccagaaatggtctcagtgcttcttcctgagacccccggaatccaaggggcatggcccccagccagggtccccggggtcctgactccacccaa

SEQ ID NO: 35339 - DNA, 120 bp, Homo sapiens
ctccggggcagcagccacttgtgtggggagaggttggggtcagctgatgtgggctgggggcaccccaatctccagctggcctagagtctccgagagcaaagcaagtcggaaccggagccg

SEQ ID NO: 35340 - DNA, 120 bp, Homo sapiens
gtccggcagtggcggtggttctcctgctgccctgcacatgccatggtcagagtggccacagtgcccccatgatgtgctgcaggggcgaggcggggcgaggcaggcctgcgccagggagag

SEQ ID NO: 35341 - DNA, 120 bp, Homo sapiens
cagcgccccgtcaccagcaccccatcaccctgcatgccctcaccctgtctccttgggtccctctccctactcagcacacacggtgacctttcaggttctccagtgggtccttttggactc

SEQ ID NO: 35342 - DNA, 120 bp, Homo sapiens
ccccgctttgctggcctcaacaggaacccagcccctgtgcacaccagcactggataataggtccaggatggcccaaggagagaagctggctcacctgctggctgacaggtgaccccggac

SEQ ID NO: 35343 - DNA, 120 bp, Homo sapiens
ctgcgaccatgcacccacccagaacccactggacccctgggtcccaccagctgcctccggcactcctgccctaggtgactggagctgtttccagggctgaattattcccagctggcctct

SEQ ID NO: 35344 - DNA, 120 bp, Homo sapiens
tcccgcagcttccaggaccagcagctccccagaaggcgttgtctcctctggctgtgggctcagccatggtggggctggcagaaggaggcgggaggagttagcctgaggaaaccgctgggc

SEQ ID NO: 35345 - DNA, 120 bp, Homo sapiens
ccccgcggggacagaggaatcctgtgaggggggccactccggcctggagatctgcagccgcttgggccctcccttctctcaggccgagagcgcctgtgaggggtggatggttacagctcg

SEQ ID NO: 35346 - DNA, 120 bp, Homo sapiens
gcacggccgggtgcctgcagggccgggctctgcaccaccctctccatctccaggtcctcacatcgctctgagatcggcctgtcaggcccatttacagaaggggaaaccgaggctcgggag

SEQ ID NO: 35347 - DNA, 120 bp, Homo sapiens
agtcgaaattccgagctcagggcagcagagccaggatttaaacacaggcttcctgacttctaggctagggtttcaagcacctcccactcaaaggggagggtgatgtcagaaacagccaca

SEQ ID NO: 35348 - DNA, 120 bp, Homo sapiens
ccccggaggccgggaattatgccctgaccccaacagccatctcccggctggccgaggggaagtttgctgaaatttcaagagctgcacttccaagcccagcaaacaccagggccaaccgtg

SEQ ID NO: 35349 - DNA, 120 bp, Homo sapiens
ccacggggtgctggggtgtcgggacacagggagtcagacaggtcctctgtccactgagacctctcagcctagtcagaaagatacagagtgggtgggtggttccaaggcatggatctggcc

SEQ ID NO: 35350 - DNA, 120 bp, Homo sapiens
gagcgtgcagaaacccatgcacatcatgagccaattctcaagctcctcatcaccagcagggcagcccagagggagccccacgtgggcagcagcagagggaggaccccactgtcctggctc

SEQ ID NO: 35351 - DNA, 120 bp, Homo sapiens
ctgcggccccctgtctgtttccaaatttccccttcaatgccgctagctgggaaccggaggtagcactgggcaggcaccctcccagcgggggcacgagctcctccagccaagacaccaggc

SEQ ID NO: 35352 - DNA, 120 bp, Homo sapiens
gctcgaacggggggcaccgagggggcggcattccagatggcattccaactcctcctcaacaatctgtccatttcctgcctggctgcaaatttcaacatttcctccccaggccacctccgg

SEQ ID NO: 35353 - DNA, 120 bp, Homo sapiens
gcccgccgcctgccctgtgctgaccggaggacagaggacgtcccttgtcctgccagctcagcatggacccagccctgcccttgcttgagccaagaggcccaagggtgaggaagcggggca

SEQ ID NO: 35354 - DNA, 120 bp, Homo sapiens
agccggggtcgggggggatctcggggtccagcccccatgataccactaacctcatctgtgcgcctaacctcagtgggcacatatgcagcgccttccatgtgccagcccctctcagacatg

SEQ ID NO: 35355 - DNA, 120 bp, Homo sapiens
acacggcccaggggaggacatggcacacggggtctccctgctgatacttggggcgcaggcattccctgcggggagctggacccacacatgggaaagggactccaggaaggggagcgtgtg

SEQ ID NO: 35356 - DNA, 120 bp, Homo sapiens
agccgggaccagcccagacgggaggcactggcccattccaggtccccgcacccggaggccggctccccagcagctgactgacctgagcagatcctgggagaggctggcagtgggcagaaa

SEQ ID NO: 35357 - DNA, 120 bp, Homo sapiens
cagcggggatccccaagatgcagtgagggcttccccagcctccctcacactaaagaggtggctccttccagcacttccaatcagacaggttcttatggggaggtgggtacaggagccttg

SEQ ID NO: 35358 - DNA, 120 bp, Homo sapiens
ctgcggcccaaggccccctcccgaggtctgcgggcatgtccaggctgggcgccggctgtgggctgtgggctgtggccctgtggcctagggagcccccggcagggtgcctagggtttgttc

SEQ ID NO: 35359 - DNA, 120 bp, Homo sapiens
atccggagagtccagggcccaccctcaatctttgtttttttggcttaaagtagctggagtctgtctgctgctaggagccgagagcgccgcccgcagtgggacggagccggccccacagct

SEQ ID NO: 35360 - DNA, 120 bp, Homo sapiens
ctccgtgcactcgcgacgtgcggcggacggcggtggctgtgggtggtgctcacctgacccaggggccttcctggcctgccgtggcccggaaggacccttcgtgatgtccgatgaggcgga

SEQ ID NO: 35361 - DNA, 120 bp, Homo sapiens
ggacggttctgcccttgagtgcaggagcccagccgggcttccggggatgggcgagagagccccggccgcccacccctccaggagcacactaaggcctgggggcttcccgggggggagggc

SEQ ID NO: 35362 - DNA, 120 bp, Homo sapiens
gggcggacctggctcttgagaaacacaactgacggctcctgcggcccgagacctgggccggagcccccacctccttggcgcggttcccaaagccgcgtcccgtgagtcccacgagctgga

SEQ ID NO: 35363 - DNA, 120 bp, Homo sapiens
cagcggggtcgtgggtgctctggcgggacggcccccaggcagccccgggccaggccagcccagaagggcctaggaggcagccgcgtggttaaagtgggggtgctgtttttgttgcgggat

SEQ ID NO: 35364 - DNA, 120 bp, Homo sapiens
agccggtccaccaatgacctcgtgccagcggcatcacgacgctgcctcacaccgcacaagactcgccgggaagatgcgagacccatgacagagcccagaaaggcgacggggtggcccaag

SEQ ID NO: 35365 - DNA, 120 bp, Homo sapiens
ccacgccaggcccagcactctgctcttcccgctcacccactcggccgggcctgtgccctcccgcccggccaagtgggggctccaggaagggcagcgagtgccccgcggccccggccccac

SEQ ID NO: 35366 - DNA, 120 bp, Homo sapiens
acccggcgccagcgtggagagaggagaggagcaaagcgcctcgacacattctccctcggtgatttaatggccggagcattcgtgcgatatttatgcagtaaatccttccactggggggtt

SEQ ID NO: 35367 - DNA, 120 bp, Homo sapiens
tcacgggaggctcctcccagcccgtccccatcccgtcccccccaaaaaaagaatcctgagaaaatctcatttcacagtttcccatcgagccaggtgcacagcagctgcggtgggcatggc

SEQ ID NO: 35368 - DNA, 120 bp, Homo sapiens
tggcgggcgcgggtcctggggaacaccctctgctggcgtccgcagcccgggagggagcgtgaagtggaggatctcggcaggcgtggctgtgtccaggcaggcgggtgctgccgcgtcccc

SEQ ID NO: 35369 - DNA, 120 bp, Homo sapiens
agacgacgttcaaatccagctttccgagcaaggctcacaccaccaggaaagccgatacactttctaaactccacttctgagttgaatattcgaaataggctcttaaagcaaatgttggcc

SEQ ID NO: 35370 - DNA, 120 bp, Homo sapiens
ccacgtcagagtcaaccatgttcatcggatgcctccagccccaccaaacagtccaccttcaccccaccctgccctggaaagtacaccaaagtgcccctggtactgtggggttgtgggggg

SEQ ID NO: 35371 - DNA, 120 bp, Homo sapiens
acccgcaagcgtcttcttcaaaaacagctgcaaatccgagctgaacctgccccagccacgctgccgagctgagcactaggagctgggcttgaagccaccaggaggggcccatccccaaaa

SEQ ID NO: 35372 - DNA, 120 bp, Homo sapiens
gagcggacgtctctggggtggtcgccacatacggggctcaccccaccctgtgcagtaggaatgaccatgtcctagacagatggaggctcggagcctgggaagctgtggaatttgcccagg

SEQ ID NO: 35373 - DNA, 120 bp, Homo sapiens
ccccgaaccaagccactccctctgccccagcactcctgcctgccctggcgccttggggctgccctgcctcctttacggctgtccctgcagagtggactcaggtcattggccctggggggc

SEQ ID NO: 35374 - DNA, 120 bp, Homo sapiens
atccgtcctcaggctcagccgtgcagaggagactggcagatgtgggcctggttctcccagtgaccaaatgaggcccccatgtgtgtgtccccaagagaccagaccaggtgggttggctct

SEQ ID NO: 35375 - DNA, 120 bp, Homo sapiens
ctgcgtggctcagtgctgagctcggctgaccggccacccagcgcccgatgccccaaacatccacacgcatagaagaaacatgaccagggcctgggagggtttccgggcgtccgcctcccc

SEQ ID NO: 35376 - DNA, 120 bp, Homo sapiens
tgccggggctgctggtcagtagcaaacacaactctcctctaataaaaccaatcgtctgaggctgcggacgccacaagaggaaacagctgtgcactgctggctgcgaacacatgtttcaag

SEQ ID NO: 35377 - DNA, 120 bp, Homo sapiens
ctccgggctatggagaggagaaccgccgggccgtggaacatacattatcacgcacacacaccgatcagttcagcagaccaccacggagatcctgctgcgtgccagagaccgtcacggatg

SEQ ID NO: 35378 - DNA, 120 bp, Homo sapiens
aaacgacagatgtcagaagtaaagggtcccatataccccaaaagacacgcaggagtatccacgtccactgtttataagggtccagaatcccaatgtccgtccggaagcgtatggacttaa

SEQ ID NO: 35379 - DNA, 120 bp, Homo sapiens
aaccgaaagcgtgtgcctgcaagattcctcctccgcgatgttctggagcaggccacgctaaccggtgctgatgaaaagcaggagagcggcatcctccacgtggggattgttctaagggca

SEQ ID NO: 35380 - DNA, 120 bp, Homo sapiens
ccacgggtccacagatttcaccccgtggaaattctttctcaacagactgctgggaaagccaggtaaatgcttgaggaatgtcagcctcctccctcaccctcctccctcaccctcctccct

SEQ ID NO: 35381 - DNA, 120 bp, Homo sapiens
acacgcccagcctgggcacactcggcagaccgctgatgatctactggaagagcagacgagggtctgacttcctaagtcatggtgtcagcctcgaacaggagtgttctgggtccagggaga

SEQ ID NO: 35382 - DNA, 120 bp, Homo sapiens
tggcggggctgagcccattcacccatcaagcccccgtttctcatctgtatgatgggaggctccccgcaccaccctctcttccctatcacctttccgactgacctgggtgggggccaggtg

SEQ ID NO: 35383 - DNA, 120 bp, Homo sapiens
ccccggacaaggaggggcatcaaagcaggggagacagaggagctctggccccgtcttccccagcagcccatgagccatggatcagccgggggcgcccatgttgagcagtcccagggagcc

SEQ ID NO: 35384 - DNA, 120 bp, Homo sapiens
gcccgctgccctgagccatttgaccagaggggtggcccggccagctcggcacagtgctgaattctggggacctcatcgctcctgccggtcccctaggggctcacagtggggctggaacga

SEQ ID NO: 35385 - DNA, 120 bp, Homo sapiens
ttccggaacgcagccacgtgggagcggttgctggaacttcctcacactgcctgttcaggccgggcccgcattccccctccaagggaagggagggccagagccggtgcgaaatctgtcctg

SEQ ID NO: 35386 - DNA, 120 bp, Homo sapiens
tcccggggcaggctcaagtttctaaggagcataaactatgtcttacaagtcgagatagtgactccagtgactgaaaacatcagaaatagctctgctgagtcagtcccttcccaaagttct

SEQ ID NO: 35387 - DNA, 120 bp, Homo sapiens
tgtcggccagagggctgaccccacaggccccagctcacttgcaacagctcctgcagcccagggagaaggcatgggagggacccgggtggtggcacctggcagctggtgagcagccctgaa

SEQ ID NO: 35388 - DNA, 120 bp, Homo sapiens
aaccgtccctggtgacaaggaggggacacagcttagaggcacccgccatgccacctttgtggagctgggcaggcctggggtttagggactcggcgcaggtcccccggccccctcatcctg

SEQ ID NO: 35389 - DNA, 120 bp, Homo sapiens
ccccgaggaggagtgacctttggcttgtttggatgttaagcggggaatccgcacacaagccacagtgtatgcgcacacacacagaggcactgacgcacggtggctttacatgaaggaggt

SEQ ID NO: 35390 - DNA, 120 bp, Homo sapiens
gtgcgttatatcacatgacaggaagttcaaggtgtgcactcagtgattctgtgataccacaggagctgggattcctcctcctctctaccctgccattctcaattggcctcacacctcata

SEQ ID NO: 35391 - DNA, 120 bp, Homo sapiens
ctccgaccgctgacccctccctggggattcagtgagacctcggaacccctggggcaggcgtgctggggactacgtggggggatacctgcgccattccccagacgcctctggggacctgct

SEQ ID NO: 35392 - DNA, 120 bp, Homo sapiens
ctccggaaggggtgtcacagtactggcaccaatggccctagtgggggacaggggctgtgaggctggtcctgcctcgtgtgtgctctgggctttttcctcccagagtcccctgagggagac

SEQ ID NO: 35393 - DNA, 120 bp, Homo sapiens
gcccgcaggggatgggggggtctgtcggcagtggctcctgcagcctgggtctagggcctgcaatgggcttccctgcctgactggggttgcctagaagtcagagtcaaggaggggtgtttc

SEQ ID NO: 35394 - DNA, 120 bp, Homo sapiens
agacgactaagggccttggtggagccccatgtccagggccttggggccaccaggctccagctcagaaaccagaagggcccgggatggcttccaccacccagggaggggcgagcaggggcc

SEQ ID NO: 35395 - DNA, 120 bp, Homo sapiens
agccgccggatgctggtgcgtggctgggtgaccgggggccggatcataaatactgcacattttttggtggctcaaaggccgggatagaaacagtggctgttttattctgtagaaaccaca

SEQ ID NO: 35396 - DNA, 120 bp, Homo sapiens
acacgcttttcatctgagtaccctcagggagtggggttggactccagctgtgccaggccagggtgggagtccagggggcaggccaactcccgcttgctgcagtcacctttgaggccccgc

SEQ ID NO: 35397 - DNA, 120 bp, Homo sapiens
tcccggctcccaccccagggagaacgggagcagcctcaaatgctgacggcgaagacccagggcccccagaagtgcgagggcctccttcagtgcccgctcggggccagggactctgccaag

SEQ ID NO: 35398 - DNA, 120 bp, Homo sapiens
cagcgctgggcagggcaaggtggcctgggaagtccttcagggagggcaggcagggacgcttcaagagcctggggtctagaggtctcatggtgccggccctcaccacagctcctgcagctc

SEQ ID NO: 35399 - DNA, 120 bp, Homo sapiens
ggccggccactaaggagtcctctcactcagtctttccatcagggaagccactcacaggtgggcaaaggggggtaagggttggcggtcctggagctcagcccatcccaccgagcctccctc

SEQ ID NO: 35400 - DNA, 120 bp, Homo sapiens
ggccgaacctgggagggggcacctgtctcccaagcactctgactccctgaccccaacccagaccaggcctaccaagtacctgtggtccagctcacaccgggccctgtcaccaggcaagct

SEQ ID NO: 35401 - DNA, 120 bp, Homo sapiens
ggacggggggctctggttgccaaggccctgcagacggccatcccataaacagccctccccggccactcactccgttttcccagctgccgccccatcagaaaagtcctgcgcttcaacccc

SEQ ID NO: 35402 - DNA, 120 bp, Homo sapiens
ggccgtggcttcttgtgcttgacaagagggcacaaaccagaagggcttctctgcagaacgggatccccgagcctggcccagcccagcaactgctctgcgcactggacccaggcaaagacc

SEQ ID NO: 35403 - DNA, 120 bp, Homo sapiens
cctcggcttcacctaccgctgggaatcccaagacagctgtagggacccacggctggagaccacctgccgtcactgactctcccagccagttccaaccccctccacagccaggacacagag

SEQ ID NO: 35404 - DNA, 120 bp, Homo sapiens
gcacggtgtgagcaggtgcattcaggtgtccaggcaggtgcaggaacctcgttttaacaggcggcaccatcgccgctcagcaatccctgagcccaagggctctgtcctctgccatgctgg

SEQ ID NO: 35405 - DNA, 120 bp, Homo sapiens
tggcgaggcgtccttaccctgcctgagctgcagctccgtttcacagatgtgcacgccgacatgcagatggaggcccctcggtcaaggtcacagggctcacaagacatgaagagctgaccc

SEQ ID NO: 35406 - DNA, 120 bp, Homo sapiens
ggccgggagggggcccaggcaggagcagaaatcccgggaacgcagggcagagccgcgacaaaggctgcaggcccacgtgggtggagaggctcggaaaggatccagcctcagaccacagcc

SEQ ID NO: 35407 - DNA, 120 bp, Homo sapiens
ccccgccacactgcagcccttcctggctggagtggcctccactctgcctgcccctccccagggctctccccatgtcgggacaggaggggctggcactagggccctcgcctgcatggatga

SEQ ID NO: 35408 - DNA, 120 bp, Homo sapiens
acacggtattacaccagacgactttatacaaaaaagaaaaatggagcattgtcgccagcatctcatggaaacaaatacatgttacattgccacacgtcacatccaatgcacattcctggg

SEQ ID NO: 35409 - DNA, 120 bp, Homo sapiens
aggcgctgtaaccggtgcagatctggacagcagcccacaggcccaggcagggccccagcaggtgtccaaggaacaggaaccagcttgcaaccacctggccctgcacttcccctccagcct

SEQ ID NO: 35410 - DNA, 120 bp, Homo sapiens
tgacgaggctgaaaacagcaccatgaagatgagctgttgaagataatccttcgtaagaaccttccagcagcacatggacaacagacgccagccggccgccagtccacagatggtcctcga

SEQ ID NO: 35411 - DNA, 120 bp, Homo sapiens
gaacgcggggtcaagattgaaagcaacctcgatggtttgtctcgtgggcctggaggtggtggaggggccagcccgggcagggtatggtgagtgctgcacatggacacaccaagacaggtg

SEQ ID NO: 35412 - DNA, 120 bp, Homo sapiens
atccgctccagggagtggagcctgcaggaggatgtcctcggcctaacccccataggtgctgaagtccgaggtaggcaggcatcccacgggtgccaccatggaggcaggtccagggacccc

SEQ ID NO: 35413 - DNA, 120 bp, Homo sapiens
ctgcggggaacaagttgtcactcagccacaaacgggctctggggcaggtgccgcagggacggcgtacgattggttgacgcatagttctttcaaaatggcttaaattaacaaataaagcag

SEQ ID NO: 35414 - DNA, 120 bp, Homo sapiens
cctcggcaaaaaagcacctgtgaccacccggacagaaatccagtctgctgagacctctgcacttccatcccacggggcgaccctccatctcatcgagtttagatatttttgtgagtccgt

SEQ ID NO: 35415 - DNA, 120 bp, Homo sapiens
caccgagtgctacaatacttgctttgatgtcacattaaacaaatgtgcactgtctctttgttctcccgagtgttctcggacacagtttttcacggaggagaacaaagaccgcacactggc

SEQ ID NO: 35416 - DNA, 120 bp, Homo sapiens
caccgtacatagtaggttcaggaatgtaacacgccatgtacatccatgtcccaggaaagggctgcggctcatcctcacctcacatctgcagggagaagggaaagacagacactgagacca

SEQ ID NO: 35417 - DNA, 120 bp, Homo sapiens
caccgaccaagtgaaccacccagcacacacatggctgcataggaggaaaacagggtgaaaacatttaacccaatcaggggcacacagggatttcaagttttcaagaaatttccagaatca

SEQ ID NO: 35418 - DNA, 120 bp, Homo sapiens
gatcgtttaagaacaattcttccacatcccatgtggcctctccatcgcacactccaacacgtgggctgcctataggctgaacatgagtaccagccaggcatgggacaacaggagtgccag

SEQ ID NO: 35419 - DNA, 120 bp, Homo sapiens
taacgctctgtagaaatgggacccacaggcaggcacaaaaccacccaccaggccacactttcagcaaacaaagccaaggctgaccaacagtcctggactgcttcaaagacccgcccaagt

SEQ ID NO: 35420 - DNA, 120 bp, Homo sapiens
acccgcaggcccaagtcccacattgcaaacaggagccagggttctcagacaccctatctctgagatcctcctctcttctaaagaaactatttgttttggccaccatggagtcccacgtgc

SEQ ID NO: 35421 - DNA, 120 bp, Homo sapiens
agacgggccaatgccaaggaccaggaaggcttgaaactgcctcctccgtgatgatggcggctgcccaggtcccacctccatctgggaagcgacatgtcttgctaggagacatttcccaag

SEQ ID NO: 35422 - DNA, 120 bp, Homo sapiens
caacgacaaagagaaggacaaagctggaggcaggctcccaagcgggagtgagccacgggccagggcgttctgcgaggcaggagcggacggggagcaaggagacccaagcccagcagacac

SEQ ID NO: 35423 - DNA, 120 bp, Homo sapiens
ccccgccgcacccggcgagacaggaagcgtgatttgctggtgtgatcagtcagttgcacctccccgccctgcaggactcagtgtgtccggcagacagtcctacctggttggctgctttag

SEQ ID NO: 35424 - DNA, 120 bp, Homo sapiens
ttccgttttttacctgactccctaggccttcctgttaacaaaagggcagggcggtgagtgggccgagggacggccgtcggggtgaagaactgaagcaacaaatacctacggcatttgttt

SEQ ID NO: 35425 - DNA, 120 bp, Homo sapiens
caccgagaaacttctgagtcccctcatgctcccagggcccagccatagcagggcacagaagccattctgctcctgggtggagtccgcgtggcggggtgaaggagagaccccagccagcca

SEQ ID NO: 35426 - DNA, 120 bp, Homo sapiens
cctcgaacctgctcctcccgcccaccctggcaggaggcccttctgcagattcttctcagctcagccccgcagcccactaatgaattgggtgtcttatgcactcccagcccctctcagtga

SEQ ID NO: 35427 - DNA, 120 bp, Homo sapiens
tgccgcagcttgggccaccctccccaccggacacctgcaggtgtgggatccgtctcccccgcaggcatctggcccgggagcagggcaacgaatccttcaacagcagcccagatgctcaca

SEQ ID NO: 35428 - DNA, 120 bp, Homo sapiens
aagcgttgcgctcaagggggccacctaacaccccaaaagcaaggctctgaagacctgttctccaacaccgatgccgacgaaggcagccactcacccgtgtcctcttcccgataatccgga

SEQ ID NO: 35429 - DNA, 120 bp, Homo sapiens
ggtcgcgcaggcgcactccaaatgctcctctaacctcacctggacttcttttaattttggcttcttcctgacgtattccaccttggccacctgccagagagaacagagcccggccatgaa

SEQ ID NO: 35430 - DNA, 120 bp, Homo sapiens
cttcggacatcacgacgtgctgggagccggggacaggctgagagggaggagagagcagcctgacccctgacctcctcccagaaacactaccttgtggtggggagtgtagcagtaccaggt

SEQ ID NO: 35431 - DNA, 120 bp, Homo sapiens
ccccgaggacgcgggacttgggtagaaagcagggactggcccctgaactccccaaacctgctagttcctcctcagggggctggagggccatggggctgtcctgtaagaagggacaaaata

SEQ ID NO: 35432 - DNA, 120 bp, Homo sapiens
ggacgcgggggtggagccctggagccaggtgtgagtggggcggggcacacgggtgtggtgagggtgtcggggggcagccgccggacacagcacgcgcgtccccaccagttcagcagccgg

SEQ ID NO: 35433 - DNA, 120 bp, Homo sapiens
cggcgcaggagcacgatgcccacactgcgaattggaaattaggcgcgaccacgtttccggcaaggctcctggggacaggccccgacaagacagggcgcttaaggaatttatgatggctct

SEQ ID NO: 35434 - DNA, 120 bp, Homo sapiens
aggcgggctggggcaggagacaccctcgaaggagggaggcctcgggagaggccagagccagaggcaccagggccaggcctattttagggaggagggaacgggtggcttgcctgaggccac

SEQ ID NO: 35435 - DNA, 120 bp, Homo sapiens
ctgcgctgggagagcgggcagctcctccccacccggccctgccctgcccatcgcggcctcctggactcaccctgacccggccctgccctgcccatcgcggcctcctggactcaccgatgc

SEQ ID NO: 35436 - DNA, 120 bp, Homo sapiens
ctccgaatgggcaggggccgcttctcgggcacatgcttagtggcatggaccccgtgagctctcaggctggtgtccaaagaatcctcactccctgcaggcggaaggagaacaccgtgaatg

SEQ ID NO: 35437 - DNA, 120 bp, Homo sapiens
gcccgtgcgctgtgccctgggcctgtccagccgcacttcccacagaccagctttgggagccactggggaacaggcacctggcggcacagcccctcacagctcccgccattaggggccctc

SEQ ID NO: 35438 - DNA, 120 bp, Homo sapiens
cctcgattcccaccagggctttccagagatgcagggcatgaaacactggaaaccgcagaaaacgccccgttagcacagaggtccccacattcaggggcccgtgacgaagcgcagggccct

SEQ ID NO: 35439 - DNA, 120 bp, Homo sapiens
cttcggggaagaggttgcaggtggtctcccctacggtgcctcctccaaggtagcccaggtgagggctgccccggggcaggaggggcctgaggccgcccagctccgtgcacctccccgagg

SEQ ID NO: 35440 - DNA, 120 bp, Homo sapiens
gagcgagggagaagcagaggccgctgagatttctgcaggtgcctgtacgtctccctccctccccctcactaaagcactcctggaagaagtggcctaacctctgaggggcactggaagccg

SEQ ID NO: 35441 - DNA, 120 bp, Homo sapiens
ctgcgggccagaccccactcattcctgaaatgagtctactctagggccagcggccatgaggagaggcaggagggcacgtggcctctcgtggaggctacacggaggagttcccgcagcctg

SEQ ID NO: 35442 - DNA, 120 bp, Homo sapiens
aggcggcctgcggagaggggttgagagaagctggcatctgcgagccgtgtttacagccaggcggccaggtgcaggtggggcagtggcccagagccaagaccagcactgaccggggagcag

SEQ ID NO: 35443 - DNA, 120 bp, Homo sapiens
ccccgccaccccacccagctgcacacaccaccccttcacaggcgctgacggctacagcagacaggctgggggagtctcaggtctctccaaatcccgcagtagggagaggacccacagtcc

SEQ ID NO: 35444 - DNA, 120 bp, Homo sapiens
gcccgagatggggctatttacgttatcagccgctcaatgaaccacgggcgccaggccagaccactttggggaacaaagctccccagctgccactgcacacaggacaaacaggccctaaac

SEQ ID NO: 35445 - DNA, 120 bp, Homo sapiens
aaacgcgggctgccggtcattaaaagaccacatgctggcctctggatctaaaagccacaggtgaaaagccttcactcttcactccagcacaccctccgaatgaaacgcttgggctccggg

SEQ ID NO: 35446 - DNA, 120 bp, Homo sapiens
acccgtgctcctccagccacagtcaaggagcggccaagaccccagacggtgcctggctcagtctccccaactgtacagtgggacgcagcctgcatgctgggaggagccaaatgccagtca

SEQ ID NO: 35447 - DNA, 120 bp, Homo sapiens
aaccgcagggctgacttaaccaagaggtcaccgacttggataaaaaacccacgcccgcgcggacccccctccccggccttcgtttccattcaaactcccagcgtcctcattgcagcccct

SEQ ID NO: 35448 - DNA, 120 bp, Homo sapiens
ggacggagggacgaggtgggtttcaggtgctcggcccaggaggggacggtgcgacccgggccccgccggcgggttttgcgcgcggaggctgcggcacctgccccgcccgccctgccgcga

SEQ ID NO: 35449 - DNA, 120 bp, Homo sapiens
agacgggggcggtcacatgcttctttctggccaggaatcgagtttcacttccagccgctattagtcggttcacacagttcactgcaaacatttgataatgaggctaaatatactcccgcg

SEQ ID NO: 35450 - DNA, 120 bp, Homo sapiens
cgtcggaggaggcgtgggcgtccccgcccaggcccgggagacagaggcgctgaccccgggacagagcctggctttgtgcgggaggcagacgcgccccgcgcgccgcccccgaaacattcg

SEQ ID NO: 35451 - DNA, 120 bp, Homo sapiens
ccacgtggagaggcccaatgcgaggccacaagctggggcatctccaaggaagatcagccccagactccatccctgtgcctcctggtcttcccggccctccccagacactcaaggcatggg

SEQ ID NO: 35452 - DNA, 120 bp, Homo sapiens
taccgcagtctggaggcccctgtgccaaggtctttcaggacccataggatcatcttggagaagaatcgtctgtgcacacacagccacatggaggccagatgaccctgggttcaagagatg

SEQ ID NO: 35453 - DNA, 120 bp, Homo sapiens
caacgatttcccagtcgtttcagagccaggatgagaatccaaatgcttgtttactgcagtgagctttcagtttagtttcttattaaatataactatgcataataggcaaccccattccca

SEQ ID NO: 35454 - DNA, 120 bp, Homo sapiens
aggcgtttagcagcatcatttcagaagcggaaggagagtttccccacactatcctgcaggaagcttggcagaagcccagatgcacatcctggatgctgcccagcatcatggcaggaaaac

SEQ ID NO: 35455 - DNA, 120 bp, Homo sapiens
aaacgggttcagagccacaggctgaggcctgggggacttcacagacaactaggacagttctgacatttgcttccctcttgaccacctgctttgcctgctttgcaaggatggacagagaac

SEQ ID NO: 35456 - DNA, 120 bp, Homo sapiens
agacgtcatacgcgacagcagctccacagccgtgaatgtcctctgcaccagaccccattcaaccagctccacctacacagtctcgcgtcagctcacccccaaccccacgcaaccagcttc

SEQ ID NO: 35457 - DNA, 120 bp, Homo sapiens
ctgcgcagtctcgcgtcagctcacttccaaccccctgcaaccagcttcacctgcgcagtctcgcgtcagctcacctccaaccccacgcaaccagcttcacctgcgcagtctcgcttcacc

SEQ ID NO: 35458 - DNA, 120 bp, Homo sapiens
ctgcgcagtctcgcgtcacgctcacctccaaccccctgcaaccagcttcacctgcgcagtctcgcgtcagctcacctccaaccccctgcaaccagcttcacctgcgcagtcttgcttcac

SEQ ID NO: 35459 - DNA, 120 bp, Homo sapiens
ccacggggcaaacattatgaccccactttagagatgagcagtgtcagaggagttaaggaacgtgcctggggccacacagcaaggaagagctgggactagggtttgaggcacgttaggtga

SEQ ID NO: 35460 - DNA, 120 bp, Homo sapiens
gaccgtgtaattctctgctttacccagcacagcgcacgccagccagcccgggcagggccgcagcatcccaggccggggatcgccaggctccttttcaagtgcatttctgagatacaacag

SEQ ID NO: 35461 - DNA, 120 bp, Homo sapiens
ctacggtgagagaatcggcatgtatgtgtcctgggccagcagctgtcctcaggatggacactgaggtcaggtccagagcaactaattgatgtcagatctgtgagttgcctctgatcagcc

SEQ ID NO: 35462 - DNA, 120 bp, Homo sapiens
ctgcgcaagtgaaaacaatgtttggctaaggaggctggtgaggggctgacagtcttaattctaagggacgtctccagcggtgacacggggctccgtccccaagcagaccccctgctggga

SEQ ID NO: 35463 - DNA, 120 bp, Homo sapiens
acccgacccagtgaccttctgcctggctgaagaaagccctatgggtggattatacaacgcgctgcgtgcctgcaagatctgactgtaaagctgttcccatgagcagcctctgagagcctt

SEQ ID NO: 35464 - DNA, 120 bp, Homo sapiens
cttcgtggcccccaagcaggccaggggcaggcccagactgaggggtgaggggaaggcctccctgcacttggtggagaagttagaaccagacgagaggaaccctcgaggaagggaaatcct

SEQ ID NO: 35465 - DNA, 120 bp, Homo sapiens
gctcgggtaggaaagttagtcaccagccgcctaatttggtcacattccaggaggcaagagcggcccaagaggggagagagaggtcagcgtggctggtagctctggaaggggcaaggatga

SEQ ID NO: 35466 - DNA, 120 bp, Homo sapiens
tgacgaggccagggcaggcccacagcccatctggaccggggagtctcctaggccagagcccttggggccgaatggagctccgaagggtggggcccaggatcccggagccacccctgccga

SEQ ID NO: 35467 - DNA, 120 bp, Homo sapiens
gcccgacctccagacatgaaatcacccccaagtcccaggccccatatggcagggcctgcctgtctccccagcgtggcagccggggggcccgggaggaaactgcctggcctcaaagtgagt

SEQ ID NO: 35468 - DNA, 120 bp, Homo sapiens
ccccgccggctgattcagccaccctgagccaggggaggtgaggccgggactgtccgtggtctggaggggcctcggccaagcccagtccccagaggccagctcaccccagcagggcgcgtg

SEQ ID NO: 35469 - DNA, 120 bp, Homo sapiens
ggccggtgccactgttcagcctgggacccctgccgagcctcttacggccagtaattagctcattccaccaacagcctggatgggtcgtgacacccatcttacagacgggaaagctgaggc

SEQ ID NO: 35470 - DNA, 120 bp, Homo sapiens
tatcgggcagggctgggcagccccaggcaaagcccctgcatctagaatagtgacaggagcctacagtcacctgctggcttctggacccaacagaaagtccaccctgcttggaatcctttg

SEQ ID NO: 35471 - DNA, 120 bp, Homo sapiens
aatcggaatgagtgaacaaatgaaggaatgaactaatgaatgaagaaatgaacgaatggctaaaggaatgaatggacaaacatgaatgaatgaatcaacagataaacaaatgagccagtg

SEQ ID NO: 35472 - DNA, 120 bp, Homo sapiens
cagcgtatgtgcaggcaggctagcttatgtacaaacagcccactatgtgtgacgtggaacagtcactctgcaaatagagcagctgtccccacatgggctactacttagaccaagcttctc

SEQ ID NO: 35473 - DNA, 120 bp, Homo sapiens
ctgcgggctgcgtgaagccagacacagcttcgaatgggacccaacacaaaatcgtcacatttcttaaaactatgagaatttcttcacgatttttttagctcatcatcagctatcattagt

SEQ ID NO: 35474 - DNA, 120 bp, Homo sapiens
cagcgttatcagcccagtgcttgggcacctggaaggcatctcctgttcattcccggctgccagggtgacagaggcttgtgttttgcgatgtaccgatggtttattttaattaggtatgat

SEQ ID NO: 35475 - DNA, 120 bp, Homo sapiens
agccgggaggcagcaggagtgaggggtgagcaggcccagagcccttatcgtgggaaggagctggggaggtgtggtgaccagctgagcaggcctagggctggcgtttcagcaattttggag

SEQ ID NO: 35476 - DNA, 120 bp, Homo sapiens
gggcggtttgcacatgaaaggcacactcaccagggagtccccaggaattagctacccctgggagaggcagttccttctctggtcagtgaggccccaggatgtcagagcatcataaaatac

SEQ ID NO: 35477 - DNA, 120 bp, Homo sapiens
cgggccctgacgggcacccgggacctcatgggggagcatctgagcagggctgggatgaatgaggagacaccagcaaagaggatgttgagaacaattcctggggagaaaattgtggtctca

SEQ ID NO: 35478 - DNA, 120 bp, Homo sapiens
ccacggctcccgatagccacgctctccagcacctgccctttcaaactccagggcaagctccagatatcaccacactgaccatctaaagggagcttggttagcagtgaatacgtgcccgtg

SEQ ID NO: 35479 - DNA, 120 bp, Homo sapiens
gctcgggagacccccatggggctttcctgctcccttgggtaggggaggctcacgcctgtgggtcggcaccagtctgcttctcatgtccctcctcacctcccaggcccctggccccggaca

SEQ ID NO: 35480 - DNA, 120 bp, Homo sapiens
ctgcgcagcgctctgctctccccacagacaccagcaggcccctccccacatgcccctcctcagagcctttccgggaagcctgtgcaggagcgcgtgggggctcctgcggaggggcagcca

SEQ ID NO: 35481 - DNA, 120 bp, Homo sapiens
ctccgggaagcagctgttcccaacacaaaaccacactgccggagagccgggtgagccccccaagatcacgaaaatcagccgtaacggccttcagcagatgtgccactgcggggcctggct

SEQ ID NO: 35482 - DNA, 120 bp, Homo sapiens
gcccgcaaaacacccaagaaggtaaaatccgagtcgtcaaccagggagtggacagagggtcagaaagcggaaaacactggaagttgtgctcgcaagactgggatcgcggagtcgggcaca

SEQ ID NO: 35483 - DNA, 120 bp, Homo sapiens
ctgcgggaggcagcgtctgcccctcgccggtccccacacctgtcctcagccgatgaccccggcgtggatgtggagggcgtggctggcagaatccccccgccggggtgcggttgggtcaca

SEQ ID NO: 35484 - DNA, 120 bp, Homo sapiens
acacgcggtgtgcgtggggggctcccaggacgcccggcacatactcaacactcagaacacgccgcgcgactcggtgatgccatctcctctgttcaggggtgagaacaccgcgcgtgcggc

SEQ ID NO: 35485 - DNA, 120 bp, Homo sapiens
agacgcacccacgatccacgccccccacacacattttcatgattttcctacacgggtccttgggctcagctgggaggggccttgctctgcagtgaataatgggtgattgtctgaatcagc

SEQ ID NO: 35486 - DNA, 120 bp, Homo sapiens
ccacgtgcctggccccactgccaacccaccacgtgccggccttggagtatgggggaatgtgctttgctgccatttctgaacctgagggagcttatctttcttctgagagccctgttctag

SEQ ID NO: 35487 - DNA, 120 bp, Homo sapiens
agccgaggctgccaactcagaagcccccgagtgcctgcagagacggctgagaagccgagagcagggcagggcaggggctgagaaagctgggaagcctttcacaccagaaggggcatctgc

SEQ ID NO: 35488 - DNA, 120 bp, Homo sapiens
aggcgtgagccaccacgcctggccagcgacccagatttttatgtgaaatctcctgactataaaatatcaacaagtaatccaaatgtttaaaaaaacactgcacaggccaacacaaatttg

SEQ ID NO: 35489 - DNA, 120 bp, Homo sapiens
caccgcagtcgtcctgctggcggtggagcggccgggagagccaccgccattgctctgttgtctaggcaaggaagggctctactgacgtactaatttcagtagcgagaactggtgataact

SEQ ID NO: 35490 - DNA, 120 bp, Homo sapiens
cagcgacttaaaccacaatttgttgttacccttcacagttcgggggttggaggggctcagccgggcggttctcactcggggtctcccctggggttgcatccagatggaggcaggggtgac

SEQ ID NO: 35491 - DNA, 120 bp, Homo sapiens
catcggaagacccagctggcgggacgtccaagatggcacagtcatatggcagctgttgacactgggcattcacggctgtgctggctgaggctggggctgcgctggctgggtatgcgtctc

SEQ ID NO: 35492 - DNA, 120 bp, Homo sapiens
tcccgggagcagggctcccagaggctgtggtggaagctgtaaggctttggagcacccagtcttgggtaacctacgacatcattccactgcattctgtctgtcaagtgtgtacctaagcca

SEQ ID NO: 35493 - DNA, 120 bp, Homo sapiens
tcacgggcgaacatgacgctggcatcctctcctctgctcatgggcaaatgtgcacgctggcatcctctgctctgcacatgggtgggtgtgcatgctggcatcctctcctctgcacacggg

SEQ ID NO: 35494 - DNA, 120 bp, Homo sapiens
gggcgtgcacgctggcatagtctcctctgcacacgggcgggcgtgcacgctggcatcctctcctctgcagacgggcgggcgtgcacgctggcatcctctcctctgcacatgggcaggcgt

SEQ ID NO: 35495 - DNA, 120 bp, Homo sapiens
gcacgctggcatcctctcctctgcacacgggcgggtgtgcacgctggaatcacggctggggtcactcccctctcggggcccgccagagcctccttcaacgctggccagaataatcacttg

SEQ ID NO: 35496 - DNA, 120 bp, Homo sapiens
gaacgagtcctctactctaccgaccggaaatactgcctgataacggctcccccgcaaggacccccttcgtgaatgtccgtgcagcctgctgtacttttaggttggagacaagcatcattc

SEQ ID NO: 35497 - DNA, 120 bp, Homo sapiens
ggacgtggagacggaagtgactcaggtccgggaaccccaaatccaccgtgtggagctccgtgaagctggctgccctgtcgagacctgccttggtgcttcttccaggtcagcagaaatctc

SEQ ID NO: 35498 - DNA, 120 bp, Homo sapiens
tcccggcatctcggatgccccagccggcctggtgccctctggcctctgctgtttctcctgctctaccccagccttccagatctttccttatggtagagccgcagtgggaagcaccgggaa

SEQ ID NO: 35499 - DNA, 120 bp, Homo sapiens
gggcgggagaggccctgaatgtgcccctcagggaagggtagtgaggatttgcaggtgcaggggcccgagcctgggtctccagcgaaacacacacttccttcccgcaggctcttactccag

SEQ ID NO: 35500 - DNA, 120 bp, Homo sapiens
ttccggctcgaaggagccgtccccgagtcctttccactggtcttggaagggaagagtctgtgtctcggcgacagagggtgtctttgtggataaatgaggcctctttgtgcatggcctgcc

SEQ ID NO: 35501 - DNA, 120 bp, Homo sapiens
tttcggcctgtgttccagcggtggtgagcatcttccaacgccatcagcggcctcgtccaacgccatcagcggcctcatccaactccatcagtcgcctcacccaacgccatcagcggcccc

SEQ ID NO: 35502 - DNA, 120 bp, Homo sapiens
ggccggacacatgctgaccttggacaccttccatctctggggtcagggctgggaccagaggagatgccgaggccaagactaaagccccccaaaggtcttctgggcaactccccgttcagg

SEQ ID NO: 35503 - DNA, 120 bp, Homo sapiens
tcccggggcctggggtctgtggaggggtcacgtccttgctccttcctttctgtgttcccacttctacgaggagaggggtggagactctttccagctctccaggtctacctccacacagcc

SEQ ID NO: 35504 - DNA, 120 bp, Homo sapiens
ccacgcacgcagtcgtgaggaaagagctgggcctgctcagctcgtcctacatgtgcagagaacacagtgatcagagctcctggcagtgcccacctgtggtcagcctgggagaaggaggcc

SEQ ID NO: 35505 - DNA, 120 bp, Homo sapiens
cctcgatgacagtggttcatgtgcactgctgtttctggagtcagcagaaacaaatccattctttaagtaacgaacagaggcgcctctgctacttgacacagagcaatgctaggtgtcggg

SEQ ID NO: 35506 - DNA, 120 bp, Homo sapiens
ctgcggtgcccggtctaagacagaggccaggctggccatatcagcgagcagcagaaggccccccagaaagctgtctctggtccagcggcgaggagcccccacaggtaggagccaccaagc

SEQ ID NO: 35507 - DNA, 120 bp, Homo sapiens
ggtcggtgtggcctgcctatgcccaccgagctgctaagtgctgaggccaagaactgaaacgggacaatcttgttccagaatggatgctcgcacggccaggccccacactgtcctggagac

SEQ ID NO: 35508 - DNA, 120 bp, Homo sapiens
tcccgaacctccactcacacactcagcatcttatctgctctggaagaacagaagtggcatccacagagcacctaccgtgtgcacggcaccacgtcatcatgctgcaccctcacgtgagac

SEQ ID NO: 35509 - DNA, 120 bp, Homo sapiens
caacgtgcccaggctgcccgggacagagagaggagccgggacgatccagcccctggatgttgctttcatgatgccaacaccaagcccacggccctgtgagggtcaggcagctggggcagc

SEQ ID NO: 35510 - DNA, 120 bp, Homo sapiens
gcacggggccactttcagacggaatctgctgcagggagagggggctcaacaccacgcagagagaaccggaaatgtcggtggcctggctccctgggccctgcctcccccggtgcctggaga

SEQ ID NO: 35511 - DNA, 120 bp, Homo sapiens
ccacgcccttcaggacactccaagaggagtgtggctcccacagccctgagcaccaccggcccagcaaagggtgtgaaaccataaggggactctgctccaaagtatgtgcacatcagcaca

SEQ ID NO: 35512 - DNA, 120 bp, Homo sapiens
aagcgcagtgaccgcgtgctctgctctccagcccgtgacagatccgaggggcactttgcaaactctccgaggccaggagaccatgcatcctctttacctcctgccctggccatgacttcc

SEQ ID NO: 35513 - DNA, 120 bp, Homo sapiens
gcacggcaggactctgtcgcccaaggcacgcaccggtgaggagaagagctgcagctgagagcacagagctgaacatggctgcaggcctggtgggcacagctgggtgcagccactggaatc

SEQ ID NO: 35514 - DNA, 120 bp, Homo sapiens
tggcggcactgaccttgccactccaacgtgtggccctcgcgtgcccagtccaggggaccaagagaccagcagggtgggggcggggccccgagagatgggcacttggagcccaagaggcca

SEQ ID NO: 35515 - DNA, 120 bp, Homo sapiens
atccggggagaaaacagccccaggccttgcaagtcacagcagacgcagacgcaggagatgcaggtgggaacccagccctccccgatacccaggtctcagtttctccatcagctctgggtc

SEQ ID NO: 35516 - DNA, 120 bp, Homo sapiens
agacggtgcagacggcacttctccacccgctgcgggtgcctgaacgaaccgggcttcctcagtgacaacgatcttttcagaaacgccgagcccaggcccgtcggcagcagaaagtgccgc

SEQ ID NO: 35517 - DNA, 120 bp, Homo sapiens
ccgcgtgtctgcccccgagagcggagagcgggccggatgcccggggcagtggcaggcgcaatgacccagcccaggccattttagatttctgccagccataaaaaaagcacttcttttgaa

SEQ ID NO: 35518 - DNA, 120 bp, Homo sapiens
ttacgcccagccggaggaatgcaagcgtgttttgcccggggaacctcagacattaaagcctcgtgcacccgtccatctctcgcggcggggtgacagctgaaggctgccaggggcccccgg

SEQ ID NO: 35519 - DNA, 120 bp, Homo sapiens
gcccggccccaaagactgccccttttgggatcatgttccttctgtggctgagacggtcggtgaggcagggctgggagctggcctccgagctggccggtgggcactgggacccccacgtgg

SEQ ID NO: 35520 - DNA, 120 bp, Homo sapiens
tgccggcatccccaaggggggctttgtgtgggaaaaggcaggtgacccccatttccaggtacagggcttcctcaagcccacggcacggggagggcgggggcgctagaagtggcttcttaa

SEQ ID NO: 35521 - DNA, 120 bp, Homo sapiens
caccggtcccacccacttcccatgagtcggctcggggggcacggggcctgggtcccggcctcagctctgccccatcttgccagcacctacacacagaaagcctggaaaactggagcgttg

SEQ ID NO: 35522 - DNA, 120 bp, Homo sapiens
gcccgatctgaccctcaccactatcaggcaccctgaaagggagcgtattcgtggatggtaaatgctagccccatgggcaggggcttcctggcctgtgccatgtgaccctccctgacacag

SEQ ID NO: 35523 - DNA, 120 bp, Homo sapiens
agacgcactgtcagtggggtgaaatgactggtgatgcctgaccctccccacaatggccccagatggctgcaacacggcctcatcccctcacacttcaaagccaggaggagcagattcaca

SEQ ID NO: 35524 - DNA, 120 bp, Homo sapiens
agtcgtgaggtgaagcccaccagaaagccagccccggctcccacgcacggctgtggggttggcaacttcagtctgaaggcaccgctgtggaacccagcgtgacagaccccagggccaatg

SEQ ID NO: 35525 - DNA, 120 bp, Homo sapiens
aggcggagcaggggtcgccagctgtgaacggtgcccacttttcctcccaccagggcctccgtgaggtggacttgccaggcaggtcccggctctgatccccccatggatcagggtccccac

SEQ ID NO: 35526 - DNA, 120 bp, Homo sapiens
ccacgtgcacactgtgtgaccctcagcacatcacggctgcctcagagctcctgagcccaccgtcccgcccgagtgagggtgcacacgggccctcccggctgccgtggcctcacgtggaca

SEQ ID NO: 35527 - DNA, 120 bp, Homo sapiens
ccccggtcgaggctcggggaccctccgtgaccttagcagcgtcctcgaggctacaagtgacaaactgcttgtgctgagaaatggagaagccgcgtcccttcccggccccattggctgtgc

SEQ ID NO: 35528 - DNA, 120 bp, Homo sapiens
gtgcggagtcactccggacactggtcccctcctggccccactggctgtgccgagtcactccggacatcggtcccttcccggctccaccggctgtgccgagtcactccggacactggtccc

SEQ ID NO: 35529 - DNA, 120 bp, Homo sapiens
tgccgagtcactccggatactggtcagcgggggctgaggggcggggagggtccaacctccaccaaagactcaggttccaagggggtcttgggctctggataccccagcacagcctccacc

SEQ ID NO: 35530 - DNA, 120 bp, Homo sapiens
aaacgctgaggtcctgggtaaggatcagggtgaacagaggactccaaagcttacaagaaagaaaaatcaggccggatacggtggctcacacctcacacctatagacccagcactgtggga

SEQ ID NO: 35531 - DNA, 120 bp, Homo sapiens
actcggggagcaggtcatcagtcacacccttggcaggacctgtcctgggagccctctgtgtgtggggagctgcctcattcccctgtgaacacagtagggcatcatggggtacgacggtga

SEQ ID NO: 35532 - DNA, 120 bp, Homo sapiens
ccccgggctgggcccctgcctgggagcctagaggtggggtcaccccatccttcctcggataaaacgtgaagcggtggaggaaagagacgggcatcagggagtctcccagatcagacactc

SEQ ID NO: 35533 - DNA, 120 bp, Homo sapiens
cagcgttcacattttgggcggtggtctacttcctggagacaccagaccgggtctcccgcgtcccccaggtcccagcacgtcccagctcgggactaaggcagaaacaggagctgtgtgagg

SEQ ID NO: 35534 - DNA, 120 bp, Homo sapiens
gctcggggccaatacagaaacagacaccatcctgcaaatgctcccgtccaaaccagcccggcgcggccagctattcttagcgcacagggacccaaaattaaaacagaggaagcgccagct

SEQ ID NO: 35535 - DNA, 120 bp, Homo sapiens
agccgggagcgacagggcgtcaaggatggtggggaaacggcttatgcaacgccgggccaggtgcgcccagaggagatgggaaccgctgtgccctcttcctgccccaaaaccgctccagcc

SEQ ID NO: 35536 - DNA, 120 bp, Homo sapiens
ccacgcggcgacagaggcctcccagtgaaggcaggagtgagcgggttcagacagaagagagggagcgtgcaactcctcccaggaggctgcacatcatctgttctgtgtactggagtatcc

SEQ ID NO: 35537 - DNA, 120 bp, Homo sapiens
agccgccccaaagactgtgcgaacgcgccatccacaaaacacaagagccggcatcgccgtggggccgggacaggccagcgccagcaggacaccgtctctcagctggcccatggccatcaa

SEQ ID NO: 35538 - DNA, 120 bp, Homo sapiens
agacgacgcacttccaagagggaaacccagggttgaacttgctctcccagctcacggggctccatcctaaaccatcccccaggactctccccagtcctgcccttgggcgtcctggaactg

SEQ ID NO: 35539 - DNA, 120 bp, Homo sapiens
cctcgggcatggagtggagggaaccatcccaagcaggggatggaggagaggccgaggaccccggcaacacccacctggctcaacccctcctcggccgggctggaccccgggaccccaggc

SEQ ID NO: 35540 - DNA, 120 bp, Homo sapiens
ccccgaaggagagggctcggagcagacgctgtccggggctgcattggcaacaagcccaccgccaccaggttctgctgtgtcacccccaaccagctcagaggagcccctggcccagcggtc

SEQ ID NO: 35541 - DNA, 120 bp, Homo sapiens
gtgcggccacccaaaccacaggcgctggctcctggaggcctctgcccagcgatgggacagaaggagctgaggaggagacctgaggccataaggggacacctccaaactatgaaggaaccc

SEQ ID NO: 35542 - DNA, 120 bp, Homo sapiens
agccgtggcagctgaatcggcccatagcacccccgccgcccacagcaagcacaggcatacacccacgtgtgcacacaacacacacagtacagggtacgtggctcagagtagatctggcca

SEQ ID NO: 35543 - DNA, 120 bp, Homo sapiens
gcccgtgggtgagcagccaccgtgtcggcagggaaccacgctcctcacacctctttgctccatcaccatggtgagtgggtttcacgctcatagtcacctcctggcccaacatggcagctg

SEQ ID NO: 35544 - DNA, 120 bp, Homo sapiens
ggacggtgaaggggcctccccagccacctgtcttctaagaagcttccagaatccctccacccctttccactcctctcacaggccagatctgtcagggaggttggaagtgtcttttctcca

SEQ ID NO: 35545 - DNA, 120 bp, Homo sapiens
ggacgcctggccaagggtgggtgttggccttctctgtgcttgggcaccaactcaccataaggatgcgccggtagctgtcccggtcgatcccccagagcttgaggtccgtcttggctttca

SEQ ID NO: 35546 - DNA, 120 bp, Homo sapiens
tcacggtcgcagccctgggggtgccgtagatgagcgccagctccccgaagctgcctccctcgctgatgttggtcacccactctccgttcacgtacacctttggggagcaagagagagaag

SEQ ID NO: 35547 - DNA, 120 bp, Homo sapiens
tcacgggggccaggcagggtgacctcctctgcatcccatacagaaagtcccccttagctctctccagaagagggtccccgcagggcggggcacaagccctttcgcttgtgggcagagccc

SEQ ID NO: 35548 - DNA, 120 bp, Homo sapiens
ctgcgttccccagcaatgggcctgtggaccccagtgctcaccccacccccagccctgctgagagccacggtgggacagcatcagacctccacagcaggagggcccagccgccagtgccaa

SEQ ID NO: 35549 - DNA, 120 bp, Homo sapiens
aggcggacgcacccggcccccgctctgcggcacagcggccccagcctgactcccaggcagtgtctgattcaatccgtcaacttctcactcagcctctctgggcctcagtttccctagctg

SEQ ID NO: 35550 - DNA, 120 bp, Homo sapiens
caccgtgatgagctggagcctgtgatccccacggggctctgctctggggacctgtgtgcttcctctccaccccaggccattcctctgtccccacctccaccagcacacaccactgggccc

SEQ ID NO: 35551 - DNA, 120 bp, Homo sapiens
ccccgaaggagccgggcggcctcaagtgcagacctctcctgccagggcctccctccctacaggcagcgcctgagctcctcgggctggagtctgaatgggcgccctatggctgggcgctgc

SEQ ID NO: 35552 - DNA, 120 bp, Homo sapiens
ctgcggccgagctgcgcctgggaaggagcccagacaagattccctttcagcccgggtgggccgccgcccccgcacagggtgcctactatgcattgagcatcacagttgggtccgtgcaag

SEQ ID NO: 35553 - DNA, 120 bp, Homo sapiens
ttccgttactataaattgacacaatacacgctttatcccctctgggtgtcaatgagcttaaagaatagttcccattggcaaagcagttcccattggttgcatatcgggaaagaatggatt

SEQ ID NO: 35554 - DNA, 120 bp, Homo sapiens
ctccgaggagcaggcagaacgtaccttgctgtataacagtctccccagcgatgtgagtgacagggaacatggcatcgaatatgtcactgaaaagcaaaacacgccaaattagggctgcag

SEQ ID NO: 35555 - DNA, 120 bp, Homo sapiens
aatcgcttcacagtcattggggaaaatgagaaaatccatgagagttcaaagaagaaaattgaaatccttcatgacccgaaggccagagatggcaccgccagccctgggcacacaacctcc

SEQ ID NO: 35556 - DNA, 120 bp, Homo sapiens
agacgcagtttgctgttttggtttttacaaaaatggggtcatgccatacatgcattttgaactccatttagaaaaacaaaagtaacaatagattgtgaacattctcccatcggtaaatac

SEQ ID NO: 35557 - DNA, 120 bp, Homo sapiens
agtcgaaggagcctgggacccttgacacagaagtgacatgtgcattcggaacctctctgtggaaaacacagacccttcatgacacgcaaactcgaagccggtgaggccgagtctcagggc

SEQ ID NO: 35558 - DNA, 120 bp, Homo sapiens
ctgcgccaaccaggaagcctggctgtccaatgttccaaatctggatgtgaaatggaccatgcagacaggacccaaggggcatgggggagctggcagaggcacccgggacaagtggggaag

SEQ ID NO: 35559 - DNA, 120 bp, Homo sapiens
tgtcggccaggaaggtagagaggcacctaccccagaacacggtgccagcgtcacactcttattaacagatgcaataaccaccttcggagaccagacccctcaaagagcactcagcccaca

SEQ ID NO: 35560 - DNA, 120 bp, Homo sapiens
tgacgcagagaaaccagagacccaggcagggagtgcacccacggggacactccgagggtggcctcctgcctgccctgattacttaaaaaggagattcttggaaacctttgcgggcccaca

SEQ ID NO: 35561 - DNA, 120 bp, Homo sapiens
ctccgcccatgggtggtggggcttggccatgctgccccagccccagtcccgggcacctggccccggtggggacatttcctggccacggcctccctggtgcacgcatctgcaggagccgcc

SEQ ID NO: 35562 - DNA, 120 bp, Homo sapiens
caccgttctctaaactgcatttcttcaaaaccacaaagtatgggttctcagaatgaacagacctttaagaaatcattttacaattcctccctcttttttaaaaaaatatttcaacttata

SEQ ID NO: 35563 - DNA, 120 bp, Homo sapiens
ctgcggctccagcctcctccgggcccaggtgtggagggcaagtgctgcctccaccacccttgctatgcgtctccacttcacacatgggcatccgtgaccacacgtgtgcacccgtgaaaa

SEQ ID NO: 35564 - DNA, 120 bp, Homo sapiens
aagcgtgcatttccagtggtgtctgcatcatttgcatatcactgacagaaagataccctttcacaattctattctccctcctgacccatattttctgaaatgcacctgggtgaaaacata

SEQ ID NO: 35565 - DNA, 120 bp, Homo sapiens
acggagtagggggactttgactacctgatctgaaaacctactacaaaaccactgtaatcaagacggtggtggtattagtaaaacggatttgtactgagaggccagaaatccacccttaca

SEQ ID NO: 35566 - DNA, 120 bp, Homo sapiens
aatcgtgctgggacaactggatacccactaagaacaatgaacttggacacttactcactcctcacacagaaagtaactcaaaatggatgacagtcctaaatgtaagagctgaaactataa

SEQ ID NO: 35567 - DNA, 120 bp, Homo sapiens
tctcggtcaggaggggaggggacggctgtgtcccagggtcctggccctacacagaccgtggtcaaaccagggtgcatgtggtggtctgggcagcagcggtggcccgaagcaggtggccac

SEQ ID NO: 35568 - DNA, 120 bp, Homo sapiens
ctccgtgtgtcagatcctcacctggaacttggggacagtgttaccacgtgccctcagggctgccatcaggacagcgagacagcacactcacagctctcagccacacacctgaccccaagc

SEQ ID NO: 35569 - DNA, 120 bp, Homo sapiens
gagcgtgagttacaactgcctcccgaatcggagtggcttcctcattctgcagggagcagacaggtgggcgtgcagggcctggtctcaggagggctgatctttcccacggaaaccgtgtga

SEQ ID NO: 35570 - DNA, 120 bp, Homo sapiens
ccccgctgtctctgagcctcagggtcccccccgacaagtgggaacagggtcaccaaattgctgacaagatgctttgtattacaaggagccccatagggccaggaccagctcgacggttac

SEQ ID NO: 35571 - DNA, 120 bp, Homo sapiens
ccacgcaaccttcccttcgcctggcctctctccacagacccccatccccagccagctggtgaattcctcacacccgctggcaggcgacggggctatttttagtgaccagggctcaagaat

SEQ ID NO: 35572 - DNA, 120 bp, Homo sapiens
tggcgtccgtcggaatgtgaaagctggtgcatccctccttctggtcgctatgtggtccccgacacagcacagtggccagtgctgcaccagggcttagcctcaggcctgcatgaacacagc

SEQ ID NO: 35573 - DNA, 120 bp, Homo sapiens
gcccggggcagtgggccttcctgcaccttctctgggcctcgggtccccatccacatactgggtgctggaggcagaggccacgtgcagcatctcagcccccaggtctgcaggggcttgtca

SEQ ID NO: 35574 - DNA, 120 bp, Homo sapiens
aaacgtgaactggctaggggtcagaagatgtggtaccggagaccacacaccaccaaattccacaagtttcaaaatgttacagcagctgctgggtgtggtggctcatgcctgcaatcccaa

SEQ ID NO: 35575 - DNA, 120 bp, Homo sapiens
ccacgcaggccacgatcacctgggggaagtggtaagaaagacctgaggttcttctctccactcacaaatcagacaaagcaagagggcttgttgtcactgtggtattagatagcgccagcc

SEQ ID NO: 35576 - DNA, 120 bp, Homo sapiens
ccacggagagctgcaactgccccgcagctccaggcgcaggccacgagacttgttattagctggaaaacgctaggcgtgtggaaaatgactgttctcttaaaaaggttgttgtcttttccc

SEQ ID NO: 35577 - DNA, 120 bp, Homo sapiens
tcccggcaggttaatgagctgtgtgtgcattcacggtgggcaagtcagccccaagcagccacatcccagccaggtcaaagtcccagcttctactccaagctgggtggcccgacgcagcct

SEQ ID NO: 35578 - DNA, 120 bp, Homo sapiens
aaacggcagcctcgggggccacgggggagctctagaaagacaacatgcccgaggcccatggcccagggactggccattgcatacatcatctgatgcaagcttcaaaccccaggcttcagc

SEQ ID NO: 35579 - DNA, 120 bp, Homo sapiens
ctccgttgaattcagcttctaaagcctcccgggctcacgtggcccctgatttgctaacctcaaggtctcctctgctgagatccagctgggctttctgcaaatggaaatcaaattctttgc

SEQ ID NO: 35580 - DNA, 120 bp, Homo sapiens
cctcggatgaggccctgcattttccaaaatgctaattttgtttttttaatgttgcccgaaagggaagcagaaagtcccaaagcccaagccagaatggggagagggggccgtgaaggctca

SEQ ID NO: 35581 - DNA, 120 bp, Homo sapiens
gcccgtgaattcggcagaagggcttgtttttcccatcacctgaggatccgagccagtttgtggaaaaacagactgcagagatacgcgggtgggaggaagagaaacagcgacagataacag

SEQ ID NO: 35582 - DNA, 120 bp, Homo sapiens
ctgcgcaggccagcggtgctgctcaagccagaggcctgttttaattaaagcagcagagagctggagccactgccaggaaggccgcctcaagggtgaggtgccctcgcctgtgcccgtctg

SEQ ID NO: 35583 - DNA, 120 bp, Homo sapiens
ccccgccggaggcccaacgcacaacacaaacacgcacggtgccacccaattatcacgtttctcggctcccaggagctcagcgatgctccccctacaggcgccctaatcagggaaagccgg

SEQ ID NO: 35584 - DNA, 120 bp, Homo sapiens
gaccgggatagaacccaagggcctccacctcactccccaaggcctgggacacacgctccagggacagccttcatggtcctggcacatcagagagctccggaacatgcggggctgcttccc

SEQ ID NO: 35585 - DNA, 120 bp, Homo sapiens
acacgctccagggacagccttcatggtcctggcacatcagagagctccggagcacgcggggctgcttcctgaggctgctgaggtccctggccgaggcgtaactgccccgggcaccccagg

SEQ ID NO: 35586 - DNA, 120 bp, Homo sapiens
atgcggaatctgcttcgctccaatagctgacacaaggtgagaaggctgcacctaccaccaccctggggcctgccctgggagctactcaactctgcagaggggctgtgcaggtgccgtccc

SEQ ID NO: 35587 - DNA, 120 bp, Homo sapiens
gcccggagcggcctattcaccaactcaggcccagggtggagcagagaatgactcaaggctaccccagcctctttctcagaccaagtactgagtggggcctgactgcggggtctgtctgga

SEQ ID NO: 35588 - DNA, 120 bp, Homo sapiens
agccgggccagcctccaaggggcaaggcaccatccagaagaagtaccttcatggactccactgccacacagccaaagggccacagaaagatggtgatgacaatgaccacaacagtgatga

SEQ ID NO: 35589 - DNA, 120 bp, Homo sapiens
aggcgtgcctgggaataagaccactccagcccaacacctgtgtgatgggaactcctggtcctgtctcacccctgagctgtctccctgcagctgcagttcactacaggacagtatggaccc

SEQ ID NO: 35590 - DNA, 120 bp, Homo sapiens
ccccgctcactggcaatgcctaaatcacccattctcaatcttccttcaccatgcaggcagggtagcggcaggtgcaggtgatgtgtccttacaggggagggagcacaggcttaggtgccc

SEQ ID NO: 35591 - DNA, 120 bp, Homo sapiens
actcgagctcaaaccctagctctgctcctgaggagttgtggggccttggacaaggacagggaaggaaactgaggctgtgaggttgacactatgcctctcacagatcctgtgcaaaggccc

SEQ ID NO: 35592 - DNA, 120 bp, Homo sapiens
cttcgatcaaggccaactagcaataccaccatcctagaaggacaggcaggcggtctgggggagttgcagcctccctcacaaccacgttgcactatcttcctttaaatcaaaggtcttaaa

SEQ ID NO: 35593 - DNA, 120 bp, Homo sapiens
ttacgtatctctcgcacaaccttatgtatctcccacactgttacggatcgacaagagcaaagtcacacagcctgtgatgatggggatatctgtcttgaacctgaacttgtacggaggggt

SEQ ID NO: 35594 - DNA, 120 bp, Homo sapiens
tgccgcactcttcctaagcggggaagcagagagaagaagagcaggcagcctcaaagtcaggggtgtgccagacgccctgtaaacttggaaggaatttggctttgctcgccaaaccacagc

SEQ ID NO: 35595 - DNA, 120 bp, Homo sapiens
acccgcccacctcgaatctcacttcatcacatctgcaaagtccctctctgccactcaagatgacacatccaggtcccagagactaggtcgtgggtatcctggggggcctggacacctccc

SEQ ID NO: 35596 - DNA, 120 bp, Homo sapiens
actcgtcatgcccagctaactctctccatgcctagctactctagctacacccagatactccagccacacacagctatcccagccatcctcagctactctaaccactgctcaaccacagaa

SEQ ID NO: 35597 - DNA, 120 bp, Homo sapiens
catcgggatcttcacaggccaatctctgacccagcaacctgaataccaggagtctcctgcctaaccacagcatcactactcacggaaacatcggagcacggagaaatcagaagcctccca

SEQ ID NO: 35598 - DNA, 120 bp, Homo sapiens
ccacgtgaccttggcaaaggcagcagttcataaactctgattcattcttacaatggaacgctgtgcagatacgcacaacaattagatctgtacttatatggaaggacttcctagacccat

SEQ ID NO: 35599 - DNA, 120 bp, Homo sapiens
tggcgaggagcacagcagagaacaatgcgtctagtgtgttcccagggtccccacctgcactcacgggcacacgcctgcaaacacacagggcggctggagcccccaccagaccaccacacc

SEQ ID NO: 35600 - DNA, 120 bp, Homo sapiens
caccgttgccctccgggagggggagaaaaagacactttctctttgtattttatacatatggaggtcatttagattttatataggactagtatcaaaatatgctcagttaatgtaataaag

SEQ ID NO: 35601 - DNA, 120 bp, Homo sapiens
ccccgtgggagctattttatcccaagtggtgacagcatctgtaactaggctgaaaactgtcggtgagccccacaagctagcgaaacacctggacctaaaaccctgaacctccttccagga

SEQ ID NO: 35602 - DNA, 120 bp, Homo sapiens
agccgaagggggaattctgtggctcagaggaccccacctagaggcatgaatctcgggagaccaaacaagggacggtgggccccaggtcggcctctctccccgcgcttctggaaggacctg

SEQ ID NO: 35603 - DNA, 120 bp, Homo sapiens
ggacggcagacagtctctggggcacccagccttcgaggaccacgggacagagggaaggcttccccggctgccgcctctgccccaggacacgtgcgaagggaagcagcgggcggcgggggc

SEQ ID NO: 35604 - DNA, 120 bp, Homo sapiens
tctcgaagtgctcccggaggaacttcatggggcgttcgggcttggagatgcagaggtggacgatacagtctttgaggacctgctggatcccgtgcagctgcacgtacagctcacagccct

SEQ ID NO: 35605 - DNA, 120 bp, Homo sapiens
tctcgtcctcctccgaggggcaggcgggcggggaggccatggcgagggtggctgcttccttcctgtccagaaaacacacagatccccaggcctgagagctgcccggggctgcgcgccgga

SEQ ID NO: 35606 - DNA, 120 bp, Homo sapiens
aaacgcaggcggcgtgaaccaggcttctcccaggagcgtggaagaaagtcactgattctgcatttgtcaaagatctttcattctgtggggccaggtgaggtgttaaacgtgacggccccc

SEQ ID NO: 35607 - DNA, 120 bp, Homo sapiens
ccccggcaggggtggagggggctcaggcagggggggagggggctcaggcagacaggggtgcacgcggctgagaagccccttctgcagttctgaggattccgggtgggaagagtggggggg

SEQ ID NO: 35608 - DNA, 120 bp, Homo sapiens
gcccggcgccctgagggtccagccggggggttccagggcctcgtcctcctccatcccccctttttgggggcacttatgtgaaatgtgaatgctgggggcccctgcgcgcggcctcagggg

SEQ ID NO: 35609 - DNA, 120 bp, Homo sapiens
gcacgcgctttgagactctgctctggtcatttcactttctgtcccattcatcctactcccctgcctttccgctctggcttggaccactgtcctaagtggaaggaggccgcttctcccctc

SEQ ID NO: 35610 - DNA, 120 bp, Homo sapiens
taacgttccccatcttttttagagctctgatctgatccggtcgttccctttccttagctggccattcctgcagggtcttgccctttccctcccctggctgggatgtggaatgatagcagg

SEQ ID NO: 35611 - DNA, 120 bp, Homo sapiens
aggcgcctgcttcctgctggcgggaaggctttccgaaggagggaacactgatgctataaatccgtgggcggtagggagcaggaaagcagtgagggatctggccagctcaggccgtcccag

SEQ ID NO: 35612 - DNA, 120 bp, Homo sapiens
acccgagttcaggttgttaaaagatcactgcagctgcgtggagaatagattccagaagtagaggaagagctggacttggggaaatgccgagatttccacgttggttaactttggatttca

SEQ ID NO: 35613 - DNA, 120 bp, Homo sapiens
ccacgagctccctccctggaccgtaggttccacaggacagcactgtgcccatctgtgccccagccccaagcgcagcctgctggggtatgtgctcactggttgctgtggggtgagggactg

SEQ ID NO: 35614 - DNA, 120 bp, Homo sapiens
tctcggtcacactgggcaacggcagagaggttgaggcgctcacccaaagtctcactggaatagccgtttcccagacgggccccaagtagtgcagagctgaggcaagaggcggcctggatg

SEQ ID NO: 35615 - DNA, 120 bp, Homo sapiens
tctcgtctcaggtggggctgggagtgtggcctcgcctctgtcttctgggctcggcttctttcctctggccagtgtccccgtcaggcctccaccttggcttcagcaggtccaggctctctg

SEQ ID NO: 35616 - DNA, 120 bp, Homo sapiens
ccccgctggtcctcctaagcctctgggttgcacaggtgtcatcagggtgggacgcttgtccctgagcctcttcctgtgccgggcggtacagagctctccttggcagcctggattgtgtac

SEQ ID NO: 35617 - DNA, 120 bp, Homo sapiens
tggcgtaggagaggaagggaggtgaggaactcataggcaggcagccgtcctctggaagcccacagagctgggcgaggcgtgtgggagcagctctggtaactgggggcctccctgtccctc

SEQ ID NO: 35618 - DNA, 120 bp, Homo sapiens
agtcggagtctctgatcgggcccctgatgcagaccatctcccaccagcactggaaggtccgtgtggccgccattgaagccacaggcgcagtgatccattttggcaacgggaagtccgtgg

SEQ ID NO: 35619 - DNA, 120 bp, Homo sapiens
ggacgacgtgctttcccattttgctcagcgactgtttgatgacgtcccgcaggtaactggtgtttctcctggacagtctgttcctctctccaacacaggcgggctgacgtgctgttttta

SEQ ID NO: 35620 - DNA, 120 bp, Homo sapiens
ggacgttcctgttcacatcttggaaaaactagaagagagctgaactgttttaatgtttgatgttatgaattccaaggatgttagaaaggatgacttgtgtagttattgtctcttaggcac

SEQ ID NO: 35621 - DNA, 120 bp, Homo sapiens
agacgcactttcccgaaaagccaccatggttggtggacctggactgggagaagagtggagtcggggttggtttgttggggataattatgtcgttgggctttggaacccaccaagagacgg

SEQ ID NO: 35622 - DNA, 120 bp, Homo sapiens
caccggggaagctgagtgacctctgatctttctgtctctgagttacctgtcatcgtagtcagacatgtgatcttttgtgtctggcctcttcactgtgcatggttccaggtttcagccttg

SEQ ID NO: 35623 - DNA, 120 bp, Homo sapiens
actcggggtattctggggccaggatggaagccctgactcgctccctcgtctgtgctgctggggtccacccgtagggccggctccaggtgtgacatagcacctgctcaggacacccctgct

SEQ ID NO: 35624 - DNA, 120 bp, Homo sapiens
ctccggctctctccctccagcagcagagtggctgcctaggggctgtgcgcagagacacagggggaccctttcccaccaggagcctttgttcaccccccttggtctcatcaggccagcgga

SEQ ID NO: 35625 - DNA, 120 bp, Homo sapiens
gtacgctggccggcccctcctggagctggcgtgggttcggcaccaggcagcacagagggcccctgaggacatcaggctctgcccagtggggagaaagtgggcagagtgcggggtcagtgt

SEQ ID NO: 35626 - DNA, 120 bp, Homo sapiens
gcccggcacttgcagcaggcacttctggcactggctaaatatttgggctgcggagggcagttcaaggggccagggcaagaacagagcccagcaagaagtgcaggcggccggctggttttt

SEQ ID NO: 35627 - DNA, 120 bp, Homo sapiens
tgtcggtgtaagcctactgtcactgtctaaaaataaccatcactgtctaaaaataccgtcactgtctaaaaataccatcactgtatcgatagctgtctgtaaatactggaactctgtgga

SEQ ID NO: 35628 - DNA, 120 bp, Homo sapiens
gcacgctctgtaaatactggaactctattgctagctgtaaacggtgtaactcagtataactataccgtaactctaaaaataccataactatgtgtcgacagctgcctataaatgctataa

SEQ ID NO: 35629 - DNA, 120 bp, Homo sapiens
cagcgagctgatgagtggctgcgtgtcctgtcttaccagcaagaacggacagtccaaccgtgtggttgggttgccgagtgcgtgaacaggcaaagttcggtaatattttcagaccactgc

SEQ ID NO: 35630 - DNA, 120 bp, Homo sapiens
agacggtgctcagaggtaatgacctatcaataaggaattcacatgggcctggatctgaagtttcatcagagtccagttttcctgtttcctaagaaaataaggtacacaccatgtggaaat

SEQ ID NO: 35631 - DNA, 120 bp, Homo sapiens
attcgtaccatataatttgttgttagctttgcagacacagcgtaagtttccattaacagcactgaaacctccgccttaaaaaccaagcttcgtgctgggagggttgggagggcaccactt

SEQ ID NO: 35632 - DNA, 120 bp, Homo sapiens
taccgtcctcaagtcggtcatttccctgaacagagtgcccttctcacacggaagcacacgttcacgcctggtgtgtatctgacaatcacactgccagccgccagcagcagatggcttggt

SEQ ID NO: 35633 - DNA, 120 bp, Homo sapiens
cagcggctccagagtcctttctgctttgagattatccctctgttaagattgttttccttggcaatgcctgagcgtaaaggaaagcgtctcgatgctggtgagtggccggccagagctttt

SEQ ID NO: 35634 - DNA, 120 bp, Homo sapiens
gaacgctgccacgtgacagccttcccccttcattctcctgttctgccttggagctcgcacccattctgctttgcttgtgtgtttcatccatgtgtttggaaagatggaagcttgaatgga

SEQ ID NO: 35635 - DNA, 120 bp, Homo sapiens
aaacgttacgttgtgcaaatgggctggaaaagctggttaacattgtttgaagccagcaaggtcccacgagcattggcccactctgagttagccgggggtgttacagaagaaggaacttct

SEQ ID NO: 35636 - DNA, 120 bp, Homo sapiens
cagcgtttgagtccataaggaccacgtggaggagggtggtcccctctgatagtaacattgtgtttctcctttttctgtgtttggaaacactcactcactgtctgtgctacagtttctgcg

SEQ ID NO: 35637 - DNA, 120 bp, Homo sapiens
gggcggaagtgtccatgctgcgagcgctcgcggctgggagcgcagacacgtggtccaggcggaagtgtccatgctgcagcaggagctcgcactgggaggggagacacgtgatcagggcgg

SEQ ID NO: 35638 - DNA, 120 bp, Homo sapiens
gagcgctcatgctgggaaggcagatgggtggcccgggcagaagtgtccgtgctgcaagcaggagcgctcatgctgggaaggcagacacgtggcccaggcgtcaggtttgaacattcttga

SEQ ID NO: 35639 - DNA, 120 bp, Homo sapiens
acccgtcagcgtgcttctttttcccatcccaggagttggacttgacctgtggacatttggctgttttctttttgtttttaagccagaaacactgtcttgtttccagtttaagatgtagag

SEQ ID NO: 35640 - DNA, 120 bp, Homo sapiens
cagcgtggttctcgtggcagggcggcacttggcccaagactcgtgctctggcgggaggctcaagtcaggcgtcccagcagcttcggtgcaacgcctcctgcccggctgcgtggggaggcc

SEQ ID NO: 35641 - DNA, 120 bp, Homo sapiens
caccgcgaggcctgacttcgagccagagcagcgagtacattgcgtctccgtgtggcaagggcaggtgcgggggtctcagtccactaccgagcagcctgctctgatgactggcggcgccag

SEQ ID NO: 35642 - DNA, 120 bp, Homo sapiens
catcgcgaggtccccagcaacggctcaaggtgactcacagttgcttggataagccagtggacgctccctctacactggcccggggccagagcgcctccttctgcggccccaacccagtcc

SEQ ID NO: 35643 - DNA, 120 bp, Homo sapiens
agacgctgcagggactctcagagctgtccttgccctgtcattcatggagacttacagggaggcggggcggccctactgcagtggggaccccttggggcgtaggatgcacagtgcaggcgc

SEQ ID NO: 35644 - DNA, 120 bp, Homo sapiens
cctcgcgcccaccggagagcagccacggtgcaggagcttggccctgagtgtgggcggggtgagggctgcaacgctgagaagcagatattaaagaagttctttcactgaaacaattgattt

SEQ ID NO: 35645 - DNA, 120 bp, Homo sapiens
cctcgcgtctgcagcgggaagatgggcctggtgccaggcgcgggcagccgcccctcccagcgtcgggaagatgggcctcatgccaggcatgggcagctgcccctcccagcgtcgggaaga

SEQ ID NO: 35646 - DNA, 120 bp, Homo sapiens
ctccgggtggttttgcgactcagtcatctgcgaatttccggatgctgcacagaagggggtgccaaagtttttttaagatgatgtaaaaaaagcataaatttgataaaaattatgtccatt

SEQ ID NO: 35647 - DNA, 120 bp, Homo sapiens
catcgggaaggatcatccttctgttttcagcagcagaaaactgaccacagtagggggttgtctgtcactgagtcctcagctctggtgggagggcagggtcagagctgggcagggtggcca

SEQ ID NO: 35648 - DNA, 120 bp, Homo sapiens
ggccggataatattccactgcgtgcgctccacgttttccttctcccttcatctgtccgtggacaccccggttgcttccacaccttggctgtcggaacagtggggcattcggcgtgcgcgt

SEQ ID NO: 35649 - DNA, 120 bp, Homo sapiens
tgccgggctgtatggggctctatttttagttttggagggacctccagactgttctcccagcggtgctcatttacattcccaccagcagcgtgagggttcccttgtctccacatccgcgcc

SEQ ID NO: 35650 - DNA, 120 bp, Homo sapiens
cgccgggacttgtttccgcagccattttaactggggtcagaggatgtctcacttgtttctatgtgcatttctctgaggagcggtggtggtgggcaccttttcagacgcctgtttgtcatt

SEQ ID NO: 35651 - DNA, 120 bp, Homo sapiens
aggcggcggttctaagatacagtctcccatcccgtacccgcgggctgtccctgcggctgtactctgctcattcttccctttgctgtgtggaagctttgggcctggatgtgctgactttgc

SEQ ID NO: 35652 - DNA, 120 bp, Homo sapiens
cagcgtggatgtcatcacatccaggtgccgggttccctgggtccctacggtggggagacacccctcgggcatgtgtagtttgaacacagagcagccctttggtcgctttgttctcagcca

SEQ ID NO: 35653 - DNA, 120 bp, Homo sapiens
gagcgctagaagggtgatctggacgtggtgtggatgtgtattccagaacatgtaagaccgtgagactgctgttgacaattactgttgggaatggagcagctgacatacctgttccggtta

SEQ ID NO: 35654 - DNA, 120 bp, Homo sapiens
agacgaggaagcatatgaaggcctgaacatgccgggaggaagaatgagaggcccaagcgcagcacacacagccctgtggccacccgcgaattcccgcacacacacggccctgtggccacc

SEQ ID NO: 35655 - DNA, 120 bp, Homo sapiens
acccgtgaattcccacacacacacggccctgtggccacccgtgaattcccacacacacacggccctgtggccacccgcgaattcccgcacgcacgtggccctgtggccacgcatgaattc

SEQ ID NO: 35656 - DNA, 120 bp, Homo sapiens
ttccggagcgtagtcaggtaaggagtagagagcggtggagactggaggattgtcagcttagtggcaaagcgagcagggtgcgtggcgtggagagcgcccccttccagtcacgtgcagcgt

SEQ ID NO: 35657 - DNA, 120 bp, Homo sapiens
agccgaaggtgaatgaggcacagttcctgccgtcacagagttcaagggccgcttggagagaaggactcattgagaaataatcattatgatttgtgttcctgctgatcaccagtgagtgct

SEQ ID NO: 35658 - DNA, 120 bp, Homo sapiens
atgcggaaggggatcaggaaataggagggcacctcaggcaggaggacattcattgcaaggaaagagtggaggagcggcatgtaaatgggtggggaggagagggttccctggagccacggt

SEQ ID NO: 35659 - DNA, 120 bp, Homo sapiens
gcacggatgggaagtgaggagggagaagtagcagcatttgcaccagtgccgtgtgtgcaggcagccatggggggagtctgtgcgaacaaggtaggcagatttctctgtagatgggtcatt

SEQ ID NO: 35660 - DNA, 120 bp, Homo sapiens
agacggtcaaggcacttgcagggagccagccagaggtggcatgtcagggcgggaatggagagggggcatggggcacgcgccctggggagggaggagcaggcctggggcgtgatttggacc

SEQ ID NO: 35661 - DNA, 120 bp, Homo sapiens
aggcggaaatgcccaacaggaaataaaacgatgcctgtgtaccaactggaattacagatgggttacatgaattattaatggcttgcagtataaacatcaaaacagtaagagtaggagagt

SEQ ID NO: 35662 - DNA, 120 bp, Homo sapiens
gtccgttgcagaccatgcttgtgttcttggcttagggaaagtctttctaagaagtgggacatgagtgagggaagggaaagaccagacatggtgtggccaaagtcacctgggtgaagttaa

SEQ ID NO: 35663 - DNA, 120 bp, Homo sapiens
ggacgggagtatccctgccatgtagtagtggattcatatccttatgtgtatgtggtccagtaaaacagaagaagacagatctccgcacaggatgagaaatacccctggctgagaaacaca

SEQ ID NO: 35664 - DNA, 120 bp, Homo sapiens
tcacgtcactgataattaaggaaatgcacatgaaagctgtgtgagcctctgggtccagacccagcacgggctctgcaggaggaggatgctgagtgtggctgcagcacatccctgcttgag

SEQ ID NO: 35665 - DNA, 120 bp, Homo sapiens
ggccgctggctgcagatgagttctccaggagacatttggttggcggtccccatcgtactggttataaggaaattctgtgcactctaggtttgaagcaaatacaatgaaactatttaaact

SEQ ID NO: 35666 - DNA, 120 bp, Homo sapiens
agacgctttgcagtaatatgtataaactaaataatttggccttgggcttttgctgaaacactgtgatgaccaccgttctgtaagaggaagtggggtttgtattaaaaagattcagtgccc

SEQ ID NO: 35667 - DNA, 120 bp, Homo sapiens
gcacgtgatcatcggtcttctggtagaagtcgtcgttttctttgacactcagctgttttcttgatgttcaggctagatgggcttgcttaccttttcctgttgtttcatcatttccaaaac

SEQ ID NO: 35668 - DNA, 120 bp, Homo sapiens
gtgcgcctgtgtgctcatcatgccccgctcggtgtctctcgggaaggtccctgagggaaggatctggcgaaacatcgctgcccagccgggtggagcaggcgtccactgctggtaggccct

SEQ ID NO: 35669 - DNA, 120 bp, Homo sapiens
tgccgaggccgggggctgcagctctgggtgtccctgtggacgtggggcttgtggcagatggcgctctgggaggaggggcctgtgtgtccccccgtggatcagtgatagactgacagagtt

SEQ ID NO: 35670 - DNA, 120 bp, Homo sapiens
agtcgtaggtgtgactgttgtttcaggaggtaggctgccattttaaaccaaggcttgcgggatccgtgtgggcaggttccccacggtttctgatgggaacgctgcgtctcactgggctcc

SEQ ID NO: 35671 - DNA, 120 bp, Homo sapiens
catcgtcagtgaccaacgctggggcacaggaaatgcagcctgtgcattgtgctaatgtctgtaaacggtgcctttgcaggagatcccattgttcatgagtgtttcgtagaaaataattat

SEQ ID NO: 35672 - DNA, 120 bp, Homo sapiens
actcggtattgacggttgctgtttataggctgaagggaagtgctgcctgcaggttttaaagtttgccttttccagttttctttagagctgatagcatttcctgagaaaagatggtgtgtt

SEQ ID NO: 35673 - DNA, 120 bp, Homo sapiens
ggccggcactcgctcccttctgcctgctctcttcccaaagtcggtcttctgtggcccctcctcctgctggtgaggcctcatctccccgggctcagcaggtgctccagagcttccactgtg

SEQ ID NO: 35674 - DNA, 120 bp, Homo sapiens
gtccggcggggtcacttctctgccactcattagtgtgtcctgttttggcctcagttttcctaatgtgtataacggggaatcgtgctgacctcaggacatgtcgtgggttacatgaagccc

SEQ ID NO: 35675 - DNA, 120 bp, Homo sapiens
cctcgtgactgccatggaggaatgaccttctcttactgatgtggagggaaacggtcctgtttgcttagtgctggctgtggaagggaacggtcctctctgctcagtgttatttttccattc

SEQ ID NO: 35676 - DNA, 120 bp, Homo sapiens
ttccgtatcctaagctggagttcagttctgaggctttgggtccaaaacctcagttgtagggtcaggagcaggggcaccaggtctggggacagaacgtcggcaggtggctcctgtctcgtg

SEQ ID NO: 35677 - DNA, 120 bp, Homo sapiens
ctgcgaaatgcctttcaccttccaagctgcagtcttagaattaaacctggcatttgaatgcaatcatgaagagaggggagctcctctgtcagccagcaggacacgatgaaaatccaatta

SEQ ID NO: 35678 - DNA, 120 bp, Homo sapiens
ccgaccttgctccagggatggcgcgggttgtgggcggccgaccttgccccggggatggcgcgggttgtgggcggccgaccttgccccggggatggcgcgggttgtgggcggccgaccttg

SEQ ID NO: 35679 - DNA, 120 bp, Homo sapiens
ccccggggatggcgcgggttgtggtcatcacctgctttctccagacttctccctgctgggacggggagtcatctcccaggccaactggattattggggcacttcggagccaccatccagg

SEQ ID NO: 35680 - DNA, 120 bp, Homo sapiens
acacggtcgtgggtctggctcttcctgccacttggctcctcctgcagtgtgtttgcgtgattttttttattgcggcctctgaccttcttttgtctcttcagtcatctaaagagattttta

SEQ ID NO: 35681 - DNA, 120 bp, Homo sapiens
aaacggtctagtgtgtgcggtgcacccctagcccagggcctaagaggagcgtcttgtgaaggagctgtacctgccggctcaggtcccttctcggagtgactcctggcagagcagagcagg

SEQ ID NO: 35682 - DNA, 120 bp, Homo sapiens
aggcgcgtccagccagccctgcgtccgggcgtgagtgcgctttagctcgcggcagtcggcggaggggtccttgtgaaatctcctctggccccctgtcccgaggcacctgtgtgtgtcttg

SEQ ID NO: 35683 - DNA, 120 bp, Homo sapiens
tcacgtgtccctgacagctgaacgcgcaagccagcttccgtctgccaagagagaagggcgggattcgccccatgagctcggtctttcttcatttgacaccgacagtctcggccactagtt

SEQ ID NO: 35684 - DNA, 120 bp, Homo sapiens
ttgcgtttctgtgttctgctttttaatgtttttgtaagagaagagcaaaatcagctagattgtttgcccagacactttgctctgtggatacagatgttttggccggcagagagcaccagc

SEQ ID NO: 35685 - DNA, 120 bp, Homo sapiens
cagcgctcactggctctcagcgcctgtcagcaggcagaagccatttccctatctggaaggcacgtctgggtgtccacatggcacggccaatagtgcgcagcatgcagagccgggccggga

SEQ ID NO: 35686 - DNA, 120 bp, Homo sapiens
gcccggccatgcccagctgccccccactctccccggcctcgggcttgagagggtacctgtcctggcttagtcacctggaaaccaaaatccttcgcagcttccagaattctccagtacagg

SEQ ID NO: 35687 - DNA, 120 bp, Homo sapiens
agccgtccacgttcagagccgccttagacggtttgcctgtcaccggcattcctggacctggaaacgggtgcccccagccaggccggggaccactgtgtgcccagaattctcctcccgtcc

SEQ ID NO: 35688 - DNA, 120 bp, Homo sapiens
gcccggctcccagctgcccagggaagaagggagccggctgcaaggcgcagtccaaaccaggccgggggccgtgaccatcggcagtgccccccagagcaggctcctcgtgcaggaatatgg

SEQ ID NO: 35689 - DNA, 120 bp, Homo sapiens
agtcgccacctcttgctttacctcagatagaagcatccagaacgctgtagtatcggcaaagcagaagctggtgtggtgcttgctcagggtcggtgcatgcggttctgcccgtggccccac

SEQ ID NO: 35690 - DNA, 120 bp, Homo sapiens
gcacgcagttttctatagtttatctgcacagcccagaggcaggtgttttacccgctgacaataaaacccaacagagctgtgaccaagtgggtgaaaatagcaagtcattaaaaacgagca

SEQ ID NO: 35691 - DNA, 120 bp, Homo sapiens
tggcggcatcgtgaggccaggcgtgtctgggagcttgtttttccagagtgccctgtgccagacggctcccggcctcctctgagtcagtcatgtccctgcaggactggaactaggacggcc

SEQ ID NO: 35692 - DNA, 120 bp, Homo sapiens
ggccggtcacagagtcagtggtcctgtcgaggctcctgctgtggtgttggggtgggtctccctccagaaccttcactgtgcggggagcacagcaaaaccggaggcctgccaacggcctgc

SEQ ID NO: 35693 - DNA, 120 bp, Homo sapiens
tgacgggggtgcgggggcactttctctcttgggtgcgggcttttccctcctggtgccctgcctctgtgcagcacgaagcggtctcctgtggggggagggcctgtgtgccaggctaatgag

SEQ ID NO: 35694 - DNA, 120 bp, Homo sapiens
gcccggatgtggcggggctgtctgtgtttggggtccctggctgtggtgccttctgaagaggagcccttttctgtggttaactgagcatccaaccctttgcgttctcggctggccttcccg

SEQ ID NO: 35695 - DNA, 120 bp, Homo sapiens
tggcgttgctgtggctctttatcacctccactgcaattggtttttgtttgtttgttttggggggatggcgcctcgctctgtcatccgtctaggcagtggtgcaatcatggcttactgcgg

SEQ ID NO: 35696 - DNA, 120 bp, Homo sapiens
gctcgcaggcacagagctgattaactcgttatgtatcttttgataataaggcagcgatcattaagaaaaacgtgtagccaatgaaataacatgttctgggccccaccactggactgggag

SEQ ID NO: 35697 - DNA, 120 bp, Homo sapiens
cagcgcatccaagcagaggctgcctcctgccctccacgcctgctgctctcgcaggcaggggctctgctgcttacagcagtgcggccatctcggcttctctccacatcgtctgtcacgcgc

SEQ ID NO: 35698 - DNA, 120 bp, Homo sapiens
tctcgccaccccgtgcctctgtccccgtgcggcctgaggagctccagctttccctgccagcggtgctctgggagtggggacgtgatgcagggcgagcatgatgcaacggggcaccccaga

SEQ ID NO: 35699 - DNA, 120 bp, Homo sapiens
tcccgtggggggaggggtgtggcacgcagaggggcagagggcggggacactggccccgtgggggaagaaggtgctgtcacagccgttactgtcccccgtgggaccccagcctggagcccc

SEQ ID NO: 35700 - DNA, 120 bp, Homo sapiens
taacgtagacggaaagtgctggaatgaagagattagggaattaattgtattgaggatcctctcactagcagaccccagggcaggaaaagtgtctggccacctgccaggaccatacaatgg

SEQ ID NO: 35701 - DNA, 120 bp, Homo sapiens
ctgcgcacctgccctgcccagtggcctttctggtcccagctactgaaaccggtgagctgctccagggtgaggctgctttctggctcctggtgtatttggacacagataggcccttagtgt

SEQ ID NO: 35702 - DNA, 120 bp, Homo sapiens
aggcgccccatgcagccctcatggtcagcaggacacccaggatagaccccctccacgcagcacctgggccctgggagcggctgcttttaggatgccacctgttcctgggcgccttgtttt

SEQ ID NO: 35703 - DNA, 120 bp, Homo sapiens
gagcgggggagcgcggtggcgagggcacgtgggcgtggctcacggtctcctctctgtggcaggtacatgtcccagagcaagcacacggaggcccgggagctcatgtactcgggagccctg

SEQ ID NO: 35704 - DNA, 120 bp, Homo sapiens
agccgtcttgcttcctcctgcatccctttctgctccgggcaggcaagtggaggtgggaatgacctcccacctccactgatgggcaaccttgcgctgccctgggcctcggccactggggct

SEQ ID NO: 35705 - DNA, 120 bp, Homo sapiens
cctcgtgctgcccgggaggaccaggctggcctcctccctcctccctcagccgtccgcagctgctgggtccaggtggtgccatcccctcttttttcaggaaagctcatctgaggggagtcc

SEQ ID NO: 35706 - DNA, 120 bp, Homo sapiens
ctccgcctgtggcctcacgcacaccacacacagccacagaaaagtagcccgggcatccccctgggagcctaagcacctggacacgccaccttctatggcaaaacacaccgtgcacgggtg

SEQ ID NO: 35707 - DNA, 120 bp, Homo sapiens
ggacgctgctgtggcagacgatcacaggggagggaggcagagatatgaggacaggagggaaggggacgtggccgtggaaactgaggccagagggggccccagagcccaggagcaccaggg

SEQ ID NO: 35708 - DNA, 120 bp, Homo sapiens
acccgtcctgagcccagaaccagctctgcccactccgagtctcgggcccgtgggatcgtcctggagctctgccagagctgtgggagaacaaacacgtgtggcttcacgtcactgagctgc

SEQ ID NO: 35709 - DNA, 120 bp, Homo sapiens
ctgcggtcagtgacccacgtgtggccactcagaggggcgttcccatcccccccaggccccgctcccacttctgctccctgtccgtggttcctatcgttgcccgtcctttctcctgctctg

SEQ ID NO: 35710 - DNA, 120 bp, Homo sapiens
ctgcggactcagatgcagcttcttctatggccctggctgtcccgccccaacagcatgtggcttgcagcatccgtgtcctgggctccgtctgccaggccttgggtcgcgtgcaggtcccgc

SEQ ID NO: 35711 - DNA, 120 bp, Homo sapiens
cgccgttggcagcagctgcgtggccagggtcgagcaggtcctcagtgggtgcagactctcctgggatcacggggccgtctgccaagcatccccagtgggcgccgcctctccggaggtcgc

SEQ ID NO: 35712 - DNA, 120 bp, Homo sapiens
tcgcggggccgtctgccgaggagccgtctgccgagcatccgtggcccctccaggggtcgcggggccgtctgcccagtgtccgtgggcccttcccggggtcgtggggccgtctgctgagca

SEQ ID NO: 35713 - DNA, 120 bp, Homo sapiens
atccgtgggcctgtccgtgacccctcagtgacttcagagagcacttgcttggggacagcatcccatcctgctggccatgtggcctgggagccccggtcatctgagggcaggggctgctga

SEQ ID NO: 35714 - DNA, 120 bp, Homo sapiens
ctacgccacagggacgcgagggggctgtgggctccaggcggggctaaacagccccctgcagcagccaacaggccagacagaggctcagattgcagacaccgcccatcagccctgaccacc

SEQ ID NO: 35715 - DNA, 120 bp, Homo sapiens
tcccgacaccagagaccaggggctattttctctgctgagatgcaagccataaaacgcctggcgttggggaggggacagctggtgccctcggggagggggccctgggctgtcttggatggt

SEQ ID NO: 35716 - DNA, 120 bp, Homo sapiens
agacggggcctgctcccctcactgcccggagctccccgctccccaagcctctacaaggctgctgccccagccccgtgcgcacagcagcagccaggagcccccttcccatggaagaacccc

SEQ ID NO: 35717 - DNA, 120 bp, Homo sapiens
gagcgaggccaccagtgtccctcagacccaagtaaggcctgctcagaacgcctgttgactcagtgagcccctgcccaggcacagctgggtgtccccacggctctgcctccgacatcagga

SEQ ID NO: 35718 - DNA, 120 bp, Homo sapiens
ggacgcggcgcttcgtggctgagggtggacgccgagaagtgcccggggaggcatcgcagcagcgggcccagcggcgcttcccggcctctgccgctcacggccttgtgtgcaccccgggga

SEQ ID NO: 35719 - DNA, 120 bp, Homo sapiens
aggcgtgcgtgtccgtgtcaccaatgcagacgacaagtttgggccacctcgcccacgggggtggagctggctgggtccagtgtgtcggttccacagacccctgcccaggacacagcgggg

SEQ ID NO: 35720 - DNA, 120 bp, Homo sapiens
cagcgaccgggctccctaggccacagggtggggacgcgcccctgccatgcccgccgcgcccagcaggtgacagcagtgctccggaagcgcgcaggccgcggggtctgggaggccactgcc

SEQ ID NO: 35721 - DNA, 120 bp, Homo sapiens
ccccggacctcccgacagcaggcgccagcgggaaccccggtcctcccgacagcaggcgccagcgggaaccccggacctcccgacagcaggcgccagcgggaaccccggtcctcccgacag

SEQ ID NO: 35722 - DNA, 120 bp, Homo sapiens
aggcgccagcgggaaccccggtcctcccgacagcaggcgccagcgggaaccccggtcctcccgacagcaggcgccagcgggaaccccggtcctcccgacagcaggcgccagcgggaaccc

SEQ ID NO: 35723 - DNA, 120 bp, Homo sapiens
ccccggtcctcccgacagcaggcgccaggacgccgcattccaggggcaatgacgacgcaggagtgtatttcaggacggcgctggccacggtcccggacgcgccccacgcccagtccagac

SEQ ID NO: 35724 - DNA, 120 bp, Homo sapiens
cctcgctggggagggccaggacctcaggggcctgcagcccccagtcggcaccagcaacagccagtgagacggggcttctccccacagagcagcccctcacacggcagcgtcctggacagc

SEQ ID NO: 35725 - DNA, 120 bp, Homo sapiens
agccgggtgggctgtggccagaaatggccattttctcttaaaggactcgtgagtcctggggcaggactcgaccagtatttatcaaacagctaccgcgtgccgcgccctgctgtgagctgg

SEQ ID NO: 35726 - DNA, 120 bp, Homo sapiens
tcacgtatgtgatttatatgctaattgtcttgtaaactggggcagggaagcacgtggccctgctctgagtgacagctcacagggtggtggaccctctggggtgggaactgcatccccata

SEQ ID NO: 35727 - DNA, 120 bp, Homo sapiens
gaacggggccgaggccctgatcactgcaccccggccgtccctgtgaagggcctggacctggcttccggcctttgggtcctagtggctcctgccctccctcaggaggcaaacaccggagcc

SEQ ID NO: 35728 - DNA, 120 bp, Homo sapiens
ccacggcagagcagtgtctccttgctgggtaaggccttagagttgaaggcctcctctgtgagcccgcacagggctccgtctctccctgcctggcccgtccacccacgctctccgacccat

SEQ ID NO: 35729 - DNA, 120 bp, Homo sapiens
gtgcgtctggggccggcagaggctgagaaccagcgggccgtatcctgcggagggctccaggtcccagcttcgccctgcgtggagctctctctccaaacagccaggacagggaggcttccc

SEQ ID NO: 35730 - DNA, 120 bp, Homo sapiens
ggacgagggctcctggggtcagctctcaccctgttcctattctcatatagcccccagcatggggcccggcccccgacaggcctggagagacccccccactcacacacgggttcacagttt

SEQ ID NO: 35731 - DNA, 120 bp, Homo sapiens
cagcgccttcctgcccagagtgacgtgtggatgcccccatccccgccaggctgcccaggctgcaggaggggccaccctcagggccaagtcagccccagggtacccccctccccaagcccc

SEQ ID NO: 35732 - DNA, 120 bp, Homo sapiens
gggcgggggtcccacggagggccaggaagggggcgggggacccacggagggccaggagccgacacccacccagagaggggcaatggggcagccctaccacctctggccaggccccaaaca

SEQ ID NO: 35733 - DNA, 120 bp, Homo sapiens
acccgtccccccgaggggcagccccacagctctggcctggccccaaacacccgtcccctcatgggccacgtaaagcctcgcgctgcctgcgaggaacggctggtgatgttcccagtagcg

SEQ ID NO: 35734 - DNA, 120 bp, Homo sapiens
cctcgtgccgcacaccatcgtccccactatatggacggggaaaccgaggccccagacctcgtgcacagccccagccccctcctgggctccgtctgccctgtgacatttacggcaacggtc

SEQ ID NO: 35735 - DNA, 120 bp, Homo sapiens
ggtcggcccatccctgcctggtaccaccaggaggggccgtcctgaaccacaggggaaccacagaagctccgacaggagcacggggtccggagcctagagcaggaagccccgcgtctcagc

SEQ ID NO: 35736 - DNA, 120 bp, Homo sapiens
cagcgagaccagggcctggccctcaggacaacatgaggcattgtccaggcccctgtgaaagccgccattgaggctgcggcccgaggcggggccagcccgcggtgggagcagctgtcacca

SEQ ID NO: 35737 - DNA, 120 bp, Homo sapiens
aggcggggggcaagtctggctcagacacaaggataaacccccacatctgggggaggggtgcggcgcgtccccacgcagtgaccttggcccagggaggcggcgcagagggtgggggagccc

SEQ ID NO: 35738 - DNA, 120 bp, Homo sapiens
cagcgggctgaggttcacctggggccacagcgacgcaccttccgctacgcaccgacaccaagggcttctcccccggtcctttgtcgtcaaagagcatcttggggagacacagcggccaca

SEQ ID NO: 35739 - DNA, 120 bp, Homo sapiens
gcccggtggtgatccttccttttgggtggcctaacagagggatggagtggggctccgccttcctcagccatggtcctgggtggcgtggcccacacacaggacatctggggcccccgccct

SEQ ID NO: 35740 - DNA, 120 bp, Homo sapiens
acccggccatttccacccacagccaaggtgcaggctgtgggcactgggcgtggcacagcctctaggagttcttggttccggctcattccagggcagacctgcagccactcctctgtgcag

SEQ ID NO: 35741 - DNA, 120 bp, Homo sapiens
gagcgggagccacctggcccaggcctcacctggccaacgtggggttgtgggtgtggcaggcccttcccaagccccgagcttccccttcctcccgggccctgccgcagggacttctatatt

SEQ ID NO: 35742 - DNA, 120 bp, Homo sapiens
ggtcgtgaggtgtcgccactgccgtgataaagggctctggtggcaaagccagggagcagggcaggaacgccgccgggaatccccagtgcactctgggaggggttgggaggcccgggaact

SEQ ID NO: 35743 - DNA, 120 bp, Homo sapiens
tggcgctggagccctgtggaggaggctctgcccacggggccgccccagacaggaggacacgtcctctcctgctgctgcacccacccagacatgggctcagggtgggggccatggggaggc

SEQ ID NO: 35744 - DNA, 120 bp, Homo sapiens
gctcggggggtccctgaggtctaaccctgagcaccagatggacacctgctccctcatccatccagcaaagggcagaacctagggttccaaatagcagcgggcagctaggtctgtgggaga

SEQ ID NO: 35745 - DNA, 120 bp, Homo sapiens
ccccgccctgcacagcacccagagacagcagcctggagcacagacagtcaccgcctgctggtccccaggcacttggccgtctgaagcagccaggccttcgtgcctactgaccaggctgca

SEQ ID NO: 35746 - DNA, 120 bp, Homo sapiens
atacgactcagcacctctgggtccctgggatcccagcagcctccctgcagccggggctctggggcccgaggccctctggctggcgtgcctggtgcctcctgcgcgacctggaaggtgccg

SEQ ID NO: 35747 - DNA, 120 bp, Homo sapiens
agccgcagtctacgaccccatgccctctgcaagaggctgccaccctgctgccaggtaacacctggccacggcactcacggcaccttcacaaagggccagccctgcactcacacctgcaca

SEQ ID NO: 35748 - DNA, 120 bp, Homo sapiens
cctcgcctgtgcatctcacctgtgccgcacacacccgtacatctcgtctgtgtacctcacccgtgcctcatgcacactgtgcacctccccaccatcctcacacccatccaggggagagaa

SEQ ID NO: 35749 - DNA, 120 bp, Homo sapiens
atgcggcctggtctccacaggcagatcatgagcctggtgctgcggacgtggccgccccgccgggcctggtatgagaagcggccattcactcagcgtgggcttcagaggccggcaggcaag

SEQ ID NO: 35750 - DNA, 120 bp, Homo sapiens
ctccgaccctgcgagcaagcgtgtgcctgaaaacctctgccccgactctaccctgctgggaggcctctccctccctccaacccctgcccgagggtcacacgggaggctttagctcatctc

SEQ ID NO: 35751 - DNA, 120 bp, Homo sapiens
cctcgggcctggggcaggaggcgtcttgggtcaccaggcctgtcaccacctcctggccctgagcccaatgacacccatatacccctgcagaacctacgcccactgccgacgagacgctgt

SEQ ID NO: 35752 - DNA, 120 bp, Homo sapiens
acccgcctgcagaacccagaacccgcgcccactttccacgagacgctgtctgccacccgcctgcagaacccagaacccgcgcccactttccacgagatgccgtctgccacctgcctgcag

SEQ ID NO: 35753 - DNA, 120 bp, Homo sapiens
ccacgcccactgcccacgagacactgtctgccacctgcacgcacccccacttctggagcccagacctgatcttccccagaagggccactccaggggccagaggcgggcacgccacctagg

SEQ ID NO: 35754 - DNA, 120 bp, Homo sapiens
gggcgccacgtttcccaagtcacatcccggcccgaccagtcagaggtgacgagacagggactttttccagcacttctgtgagccacacctgacctttcctggcagcccgggagagcaggg

SEQ ID NO: 35755 - DNA, 120 bp, Homo sapiens
agacgcagaactaggagatagaggtgctgaaaccaggtcccaacgacaccagctaaacccctagatcaagctgtgccctgttattccagtcaatccatttccagttttgctgacacccag

SEQ ID NO: 35756 - DNA, 120 bp, Homo sapiens
tcacgccagcccagcccatgcctgcctctgaagtgaggccacgtgccaccttgctacaaattgctaagatgtttctgccgagggaaacggaggggctctggggtgattctttgggggttt

SEQ ID NO: 35757 - DNA, 120 bp, Homo sapiens
gagcgaggggtgtgctgggtgctgagcaggtccaggtgcccgcgtgttcatcccctgaccgtttcttgctctctccctcacacacacagggattcttgagaggaagaaattgctgtctgg

SEQ ID NO: 35758 - DNA, 120 bp, Homo sapiens
cagcgcctgcacaggctggctgtgtgccaagtgggggttgggggggcaggagctgccctggaggagggcagagccgacaggaccgctgcatgagaccccagcctgacctggggaggtgcc

SEQ ID NO: 35759 - DNA, 120 bp, Homo sapiens
caccggtcacccctgctcaccccacgccgctcctgggagaaaatccacggtcctgacagagcccagggaggtgcacgggaggggggcgcagtgccagctctaccggggaggtgcacagga

SEQ ID NO: 35760 - DNA, 120 bp, Homo sapiens
gggcgcagtgccagctctaccggggagttgcacgggaggggggcgcagtgccagctctaccggggaggtgcacgggagggggggcgcagtgccagctctaccggggaggtgcacgggagg

SEQ ID NO: 35761 - DNA, 120 bp, Homo sapiens; identical to SEQ ID NO: 35760

SEQ ID NO: 35762 - DNA, 120 bp, Homo sapiens
gggcgcagtgccagctctaccagggagggctgggaggggttggagcactgggggtcaggggcttctccactgaacccacctacaacaccaggactgtgttcagccatttcagggccgcct

SEQ ID NO: 35763 - DNA, 120 bp, Homo sapiens
attcgaaaaccaatggcttttccatagaaaactcaaatacaaggagagatcctgtcaccaacagcaacaggacaaatcacctgagtggctggatgagaaatgtcccaggtctccaaggga

SEQ ID NO: 35764 - DNA, 120 bp, Homo sapiens
tggcgtgtgctcccgaggacgagagcctcgacccgagacacagggaggtagaaaaatgtctccttatgggagtctacatgttttttataataattgccaaaaaacagcaacagaatttat

SEQ ID NO: 35765 - DNA, 120 bp, Homo sapiens
tggcgcacacctgtagtcccagctactagggaggccgaggtgggaagatggcctcaacctgggagtttgaggtcgcagtgggctatggtcgcaccactgaactccagcctgggcggcaga

SEQ ID NO: 35766 - DNA, 120 bp, Homo sapiens
ccgtcctgaaatcctgctgccctgactggctgtggtcagggctgggcggggcagtaggggagcccaggactcaggaagaatccggaaggtaacagcatagctcagggtgggccagaccca

SEQ ID NO: 35767 - DNA, 120 bp, Homo sapiens
ttccggccagcagcggctggcgaggggcctggacaggcggcgtgcctgctcctgctcatgcccagtggcctacaagctctgctgagcctcctgccccttgtcactgacccgcacggctgc

SEQ ID NO: 35768 - DNA, 120 bp, Homo sapiens
agccgcctcctgtgaccactcggccacacagcagaccctgggcagggggctcccgagagcagggcgagctcctccagcgtcgcctgagcacggggcctgcgcgtggtaggccagcaggcg

SEQ ID NO: 35769 - DNA, 120 bp, Homo sapiens
ctgcggggtgagcctctcagcacaggcagaagggggctctccccagggaaggggcaaatggactgaggccgggctgggccctgctctgcgaccatcttgcccaacagtcagccgagcttg

SEQ ID NO: 35770 - DNA, 120 bp, Homo sapiens
ccccgcacaggggccggggctaattcagtcaaattatctgcgcttggacagcgtctggcacgatggccgtgagctcagtaggccgccctgcaggccaagcaggggtcttcaacatccagg

SEQ ID NO: 35771 - DNA, 120 bp, Homo sapiens
cagcgcaggggtgggcagctcctggctctacctgcctcagctgtggggatgggggtcgtgatgttgggcccccatgtggccggccccctccagggaagcccactggctgtggcctccacc

SEQ ID NO: 35772 - DNA, 120 bp, Homo sapiens
ggcgacattcatagacagtgatgactaaccatcctaacaaatggtacagagagtaagtgctaaaagcgttcaaaaatagcccagaaagccctgggcacacaccaaaagggcagaatgaca

SEQ ID NO: 35773 - DNA, 120 bp, Homo sapiens
taccgcactgggaattctccaaacgtcatacacagctattttcaaatgccagggcgaggcatacgtcccaatgctaaattgaagtgatgtttgtatttctcatcagtacctgatccactg

SEQ ID NO: 35774 - DNA, 120 bp, Homo sapiens
ccccgagtgattacagactggatgacaaggacgaatgaatgaagcttttctcctctggtacagtgtgactggtatgaacacctaccttgtagggttgttgtgaggattaattgagataat

SEQ ID NO: 35775 - DNA, 120 bp, Homo sapiens
gcccgatgaatgtttgctgttgctcttctccttgggcctgaggaaacctaatctaatggtataggtgtagggcagccattctgacatggtgattaggtgttctggcaagcttttatcttc

SEQ ID NO: 35776 - DNA, 120 bp, Homo sapiens
gcacgttcccacccatttcctcgtttgagccacacaacaatcctacaacattgattggaaaggtgttatcaatgcccccattgtactgatcggggaattgaggcttaaaaaagcccaagt

SEQ ID NO: 35777 - DNA, 120 bp, Homo sapiens
agacgatgcagtcacggccttgttgcctggcagcacatctccatcatgctggagattatccagcaggtccacaggatgaaagacaaagaatctcctgtttgtagctggggctgaccctac

SEQ ID NO: 35778 - DNA, 120 bp, Homo sapiens
ccacggtagaggggcaggcagcagctgtcaaactagccagtgttcagctaggtgcttgactttatttaagaaaattatttttcatccagtctcacaggcaatggactatgccctgacttt

SEQ ID NO: 35779 - DNA, 120 bp, Homo sapiens
gctcgagctgacctgacacatccctccactttccctgtgcacacttaaacattctgccaaaactaataactttattcctaaaaccttcaattcacatagggcaagcagtgtctgcctgtg

SEQ ID NO: 35780 - DNA, 120 bp, Homo sapiens
ctacgttccaaacattcataatttaatttaacagagaattaaagtagcatacctaattttagcctcaaaatgtcaatagaattatgtaaatacagcaccgagtcccatggctgtgtgtgt

SEQ ID NO: 35781 - DNA, 120 bp, Homo sapiens
gcacgtgcacgtgggtcgttgtgggtgtgaacagagggtggagtgcgggcttgacttttccctcctgtaggcctctcttcttcacaacggagaagcaattgacaggaatagatgaggtgc

SEQ ID NO: 35782 - DNA, 120 bp, Homo sapiens
cagcgagcaaggcatgctgctttctgccagggttgggtgctgagcaaacagaaagagtcacagaaggaaggggatcccacagggctccagcaggcctccctggggaatagcaagcatcag

SEQ ID NO: 35783 - DNA, 120 bp, Homo sapiens
agacgatgaagaggagggctgctggctcgtgtggcattatcttgatggaaagacaagaacaggggaactatctgcccaccccagcatatggcaaaagctagccttgtttgcgggtaggca

SEQ ID NO: 35784 - DNA, 120 bp, Homo sapiens
ggccgttccctggagcctctgggccccagtaaggatgagaatcttcctcaaagtggggtctctttggaagtacctccagactcccttgagctcacgctggaggaggaagggaaaggaaga

SEQ ID NO: 35785 - DNA, 120 bp, Homo sapiens
gctcgggctgcggggttcccagcgctcagcttggatctctcctagtgctttggctcaagaacctgggagaactgccaagagcttacagggtggcaggaaatggggactgaatgcctgcaa

SEQ ID NO: 35786 - DNA, 120 bp, Homo sapiens
tggcgagtgggggcagtgggtaggagcagccagcctccacatgccactgtcagcctgtggacagggccagtgcccgtgggcgcttcctgttcaggccttcctgccctgcattctttattc

SEQ ID NO: 35787 - DNA, 120 bp, Homo sapiens
gggcggtgtcccaggtctcatggctacctttactccctcctccaacattattgttgccatgggcaacaggacctgcaaacaacagtgcatatgggtcaagggcaggatccaggcagggca

SEQ ID NO: 35788 - DNA, 120 bp, Homo sapiens
tttcggacttcagggagacgcaggaaggagatacacattgtcctctgatacaaaaaaaaaaaaaaaaaagcaacaaactggaaaatcaaggccaggaaagagatggggcaaagggctaag

SEQ ID NO: 35789 - DNA, 120 bp, Homo sapiens
ccccgtgctaccattgagctaggtggccagcattcgtggctcagagcacagctctgccactaccttgtcccttgggctgtgggtccacagaaagcctggttagaaacttactgggcccag

SEQ ID NO: 35790 - DNA, 120 bp, Homo sapiens
atgcgtaggagacttcatgacctctgatgctgggcagtgtctaggtcaaggtggtgactcaagtgtgccctcctccagggagggaggccaggcgggggctgagtcattgcttcacatggc

SEQ ID NO: 35791 - DNA, 120 bp, Homo sapiens
cagcgtgtaaggtgccacgcacagagcaagctctaaggtggcagtccacagctctggactagaggctcagagaaaaattgaagcaaccaagcatgtggcggtgtttgctgaaagggagat

SEQ ID NO: 35792 - DNA, 120 bp, Homo sapiens
ggccggtgagttcaggaatggctgccagtcacagaatcacagaatcccattgccgagggaaggttggggagcagcccctctgacctctccctctgaagatgagggcaggagagtccaggg

SEQ ID NO: 35793 - DNA, 120 bp, Homo sapiens
cagcgctctcaggggcttctctgtgcactcaggacccttgtcccctccccagccactggggtggcagctccatttgctcttggccacaagttctccgcaagcacacagagaaaccttggt

SEQ ID NO: 35794 - DNA, 120 bp, Homo sapiens
cctcggggctgaggcccaggttgggtgcacagatgggtgagttgagggtggctggctttcagccccattcgccctgcttaccagatgcccctgatcagagtacaatctcacagtggcaag

SEQ ID NO: 35795 - DNA, 120 bp, Homo sapiens
caccgtccttctccatgccatgctggggacacaggaagaggcacacagccctcaaagcagggcaaggcactcagggccccttggctaggcccccgggtgaccactgacaagagcaccccc

SEQ ID NO: 35796 - DNA, 120 bp, Homo sapiens
aaacggagggggagaacacaggcctgagcccggcagacagcaaagcgtacggcaaagtgaagagaagcagctaagccttctgttcctccattgcgccatcctcagcgtccagcagccttg

SEQ ID NO: 35797 - DNA, 120 bp, Homo sapiens
ccacgtgtgatcaagtccacagcagtgggctccctctgccagcatcagagaccacgtggtataatttccttgaagccctggacactgtcccactccagccatgacccctcgccccagcac

SEQ ID NO: 35798 - DNA, 120 bp, Homo sapiens
aagcggaacagcagctaatttagggctgcggctgcccccaggttccccaggtgctccgttcccactcctctcagcaggttcctgagctagtgctggtgtaattatagcctccgtggcttc

SEQ ID NO: 35799 - DNA, 120 bp, Homo sapiens
gaacgtgtaaactcctgggccaaaacttggtaaatttcctaggaaacaaaaaaaatcaagaaatgcagctcctacctggttaccaggaagataccccgtgatcctcccagcaggaaccgg

SEQ ID NO: 35800 - DNA, 120 bp, Homo sapiens
ggccggatgacgggagaaaagaccccaggagcgggcctgggctctgaggctctgccaagcacctcaccaaggaggcagcctgcgctgcgttttcattatgagggagatggtggggtcagg

SEQ ID NO: 35801 - DNA, 120 bp, Homo sapiens
ctccgtctccctgccccgatcccctgcactgagagctgagaccacacaagacctgagagatattccggagctagaaattgatcccagtcctgggctggccctggagagcctgaactcaac

SEQ ID NO: 35802 - DNA, 120 bp, Homo sapiens
acacgtgctccagcgccagccctggtgggtctcccaggctggctgagagcagccttgatggccaaggagtaaatggtaaacagctgcccaagggagagggaggcgggatttaacacttgg

SEQ ID NO: 35803 - DNA, 120 bp, Homo sapiens
aaccgcagttaagtcatcctcccaacctccagctcctggccctaggggacactctggcttcttcatctcctcccctcctactccctgggtgagggccagacccggggagcgcagccagct

SEQ ID NO: 35804 - DNA, 120 bp, Homo sapiens
cctcgcagaagtgcttgacactcttgtcctctccagaaaaccgatttttaaatcacactgatctcaaaagcaggcctgtggctggcccctcctgggccccaggagagaaggggagcagcc

SEQ ID NO: 35805 - DNA, 120 bp, Homo sapiens
agccggcatgggcagccacctcctcagaggcctttagggcccctgtggaggcccagccagcagcatccctctgtactttctgcctcgggcctcccctggaacagaagcaggaatcggcct

SEQ ID NO: 35806 - DNA, 120 bp, Homo sapiens
tcccggtgaggcatcctcacagcgggtctttgcatcggccagagctggactgagattgagaggcagtgtctcccctgggactctaacccctgctaagttcccaagcaggagatcctaaca

SEQ ID NO: 35807 - DNA, 120 bp, Homo sapiens
actcgggatgggttttcccaggctggatcagaggccttttaaatgtccttcctagaattaaatccccaagcatttctccctggcaacaagaaatcaaactcataggcaggaacccaaggg

SEQ ID NO: 35808 - DNA, 120 bp, Homo sapiens
aagcgtgtggccatccgaaaccaccttggagaccgggtagatcccagctgaacaaagcaggcagtcctgggacagaaatggcccaggacaaagggaacccagtctcacttggatgcagac

SEQ ID NO: 35809 - DNA, 120 bp, Homo sapiens
tgccgcaactcggccctcatctgccagcttctgccggcctgatggcgcattgtcccgttccaactccagatccatggttgcccttgccggggtctcagctgctggctccactcccctcct

SEQ ID NO: 35810 - DNA, 120 bp, Homo sapiens
ctgcgggcccctcccgcaccctgctctctgctgcccccatcaggcagcctgctctcagagcatcccggccgcaggattttaattcaaaattctcccaagtcatgcttctcccatactgta

SEQ ID NO: 35811 - DNA, 120 bp, Homo sapiens
cttcgtccacgtcacagataaaatcgtcgaattgagcagggcttagaacagagtgttctggtacaatactaggtgccccttctagaggggaaagagtgagatttgggatcccagcaaccc

SEQ ID NO: 35812 - DNA, 120 bp, Homo sapiens
agacggaccagcccacttgagtccccacccacttagccaagggtctaattcccagaagttcccaagaacacctaggcttgtatacacttgtctaaaactcaggccttttgaggctatatg

SEQ ID NO: 35813 - DNA, 120 bp, Homo sapiens
ccacgatgactctgtgaggtgagaagaaggacatttcatctgtctgggacctaagtattacatatttaatcagaagtatgcagctttaggttgtgtgtggtggctgacgctggtaatccc

SEQ ID NO: 35814 - DNA, 120 bp, Homo sapiens
tgacgcaggggttggccttagtcttctcttataatcccctcttctttgacatggaatcctctggccctcttacttgcaaggttgataaagataataacagataagattgtgaatctgagg

SEQ ID NO: 35815 - DNA, 120 bp, Homo sapiens
acacgtcacttatttcaataattcttgcactcatttcagggtctttgttttaggaatattaataattaccgattatgaaatgcctgctacagatcaaaaactatgccaggcactttacac

SEQ ID NO: 35816 - DNA, 120 bp, Homo sapiens
acacgctcagttggatttcccataaaggaattccaggaatattttgttccatggcaacatctttgcaataagttcatggcctcccaagatgactgctttgatgtgtggatgcacgtgtgg

SEQ ID NO: 35817 - DNA, 120 bp, Homo sapiens
ctgcgtttttggtgactgcacacagctagtgagagaaaggacacctgtgacagagaggacacctggctcccagctatagggttcaccctgtccggaaagccctcccacccccttccccta

SEQ ID NO: 35818 - DNA, 120 bp, Homo sapiens
gagcgaccctgatggcatgatcagcattttctcaacaactgtcttaaggactttcattacccctcccaacttccccaaaagctacttcccctgtccctccagccctcaccccacctttcc

SEQ ID NO: 35819 - DNA, 120 bp, Homo sapiens
tggcgagaggggacgaaagggcaatgtccagcttaggaccccaaacttcttgaaggcagggtccacacatctgggagtgggattctgaggctctgaagggacaagctctgacatgcagat

SEQ ID NO: 35820 - DNA, 120 bp, Homo sapiens
cttcgggtagtaaatgccttccttcagggccaagcccccaaggctggtggtggcaaagccccccagtggccttttccacaggctaacaccgccccctgccgggctaagccaggacagcca

SEQ ID NO: 35821 - DNA, 120 bp, Homo sapiens
aatcggaaacgtggctaccttgccaaagagaaaccccaactcccactgctggcctgaagagggggaagagtaaaatccttggaagtggggccttccagcctttagtgatccagaggctgg

SEQ ID NO: 35822 - DNA, 120 bp, Homo sapiens
ccacggtgagaggagaaacagaggtcacagcacacctgggaggccaacgtccatgtctaagtctacgcccctctccctcctaagcgctagctctcccacccagcttcaggactcgtcttg

SEQ ID NO: 35823 - DNA, 120 bp, Homo sapiens
tgccggatcaatactagccatctccatctcatcgcatcagaaactaagttcatcttgttcccaaatcctgagtctcaggccgggcacggtggctcacgcctgtaatcccaacactttagg

SEQ ID NO: 35824 - DNA, 120 bp, Homo sapiens
ctacgttgggctgcacccggaagcgagaaggagaggctgataacggggctggcccaggctggggataaccacaaggcaggaagactcggggccagcagctagccagcccacacctcctct

SEQ ID NO: 35825 - DNA, 120 bp, Homo sapiens
ccccgccccctcacctgtgactgcgctgctgtacaattcattttcctccatgcagggccggctctgctttccctctggccccgagagctccttcctctgcccctagggaggaggcgcccc

SEQ ID NO: 35826 - DNA, 120 bp, Homo sapiens
ccccgtctcatcaccttccccgatccccaggcccccctctggcccaggccttctttcaggccacctcaacctgctggctctgtctgcacactgggttcgggtccccccacatggaggaag

SEQ ID NO: 35827 - DNA, 120 bp, Homo sapiens
cctcggcctgcacgcccccttgccctttccgcaccccgcgcgactcacggggaaggccaggaggcagatggcctgcacccagtcgccgcgctccgctgcaggggccgccaggaggtacag

SEQ ID NO: 35828 - DNA, 120 bp, Homo sapiens
aggcgctccttggtctccaggaagaaggcactggtgtcccgggggctgctggcctctccgccggcctcggccacccgcaggcagtcactgaggcggatgaccttccgggcagcctcacac

SEQ ID NO: 35829 - DNA, 120 bp, Homo sapiens
caccgacgaggcttctccgggccctcctgcagctccagccgggccaaggcgcagtccgaccctccatacagtgaggcgccgaagcggcgccatttctgtgccagaggcgtgggaggcggg

SEQ ID NO: 35830 - DNA, 120 bp, Homo sapiens
gggcgggagggagccacccagagacggggagatcgtgagccaaggggagaagaggaaccgtgggagggggactggggcagccacttggagatggggagagagaggtgaagatcacatgag

SEQ ID NO: 35831 - DNA, 120 bp, Homo sapiens
aatcggagatcagccgccagccccgagaaggaggcccacgagcaagagcagagactgcccaggcagaaagcaacgccgggatgagcccaaagcaggctgcaagaaggccaaacaggccca

SEQ ID NO: 35832 - DNA, 120 bp, Homo sapiens
caccgcagtggactccagtctggggaggaaagcggggcagtggccgaggcccagaggagggagtgaggagggcggcgtgtgacccgggctggagacctcattctccttctgtgcgaaatc

SEQ ID NO: 35833 - DNA, 120 bp, Homo sapiens
tcacgtgcttggccctgtagcgtcgctagccgtgctcctcagtgtgctccccgccccctgccgcggcgcctcgcctcccggctcacctccccaccccacctgcccgctgcggctctccgc

SEQ ID NO: 35834 - DNA, 120 bp, Homo sapiens
ccgcgggagatctcaccgttctggagacagggctcgctcgctctcacggtaggctggaagaacgggctgtctgggccttaggaaaggcccatgctgtataaggcatggggaaaggaaagg

SEQ ID NO: 35835 - DNA, 120 bp, Homo sapiens
caacgaacaagaaggagggcttccaactgcagcttcctgccggctgcaggcctcccttcctaagctgagctgaggcttcctctccatgggctggggagggggcgccaggaggcctcggcg

SEQ ID NO: 35836 - DNA, 120 bp, Homo sapiens
gtccgcaattggccgggacagcttctcacgaaaggtcctgggccggcatcatcagcctcacctgggaactggttagaactacaaattccctcggccccacccagaccgacgccaagggca

SEQ ID NO: 35837 - DNA, 120 bp, Homo sapiens
gggcgcggcaatgcgccccttaacagccctccaggtgattctgccgcgcagaggaggaaagaatgggagaagggaaggggagagggaggcggcttctttgcgactaattggacacctgcc

SEQ ID NO: 35838 - DNA, 120 bp, Homo sapiens
gcccgggcttggacagccgccttccggccagaggggatgaggttgcgctgcgctccgggagcgccgatggcgtgactggccccgcgcggagcagcgacagtaaggctgtgtggggggagc

SEQ ID NO: 35839 - DNA, 120 bp, Homo sapiens
agccgcgcgcacacccctttctctgcgtctggtggaggtgcacagaggcttttgagtcaggcccaagcgcagccaggtgacctccccgcggcctttcaagcctgagctcggtggacagct

SEQ ID NO: 35840 - DNA, 120 bp, Homo sapiens
tcccgtgagtcccgctgtcctgtacgcgcccggtcgagccccgggctgcgcaccccgctaggaggtgggtactcgtcctccaggagttgccggtgagcccttgaccgtggcaggtcccct

SEQ ID NO: 35841 - DNA, 120 bp, Homo sapiens
agccgcgagcgacccctcagtacctgccgatgcctgctggtctctggcatcctccagtcgagggtcagggtcagggagcaaggcctcacgcgggcgccctccttgcagctgcccggccag

SEQ ID NO: 35842 - DNA, 120 bp, Homo sapiens
gcccgcttctctgcccggagccatgaatctcagtagcgccagtagcacggaggaaaaggcagtgacgaccgtgctctggggtgagtggggactcaggctccttcccagagacacgcccca

SEQ ID NO: 35843 - DNA, 120 bp, Homo sapiens
gagcgtctgggccacactgtctgggaagaggtaggtggcagggtctccgcctctcctcccctctgtgggcactctgggccacagcgcttgctggcgagccaggctttgggtggcagcagg

SEQ ID NO: 35844 - DNA, 120 bp, Homo sapiens
ggccggcccctgggaccagctgggcctgatctaatggaaccttctgatctggggaagagggcctggggtgttctcatcccaaggatgagaactgctcccagcccaatcccctctttgcca

SEQ ID NO: 35845 - DNA, 120 bp, Homo sapiens
ccccgtcagggcgttggtacagggagcaggactgggtcagacctgaaggtggtggcacagatgtttttttctgctttgtgaaaaacagaggcttgccttctctgagtgtcagtgggggag

SEQ ID NO: 35846 - DNA, 120 bp, Homo sapiens
aaccgatgctgctgccccctgataaagggctgggcatgcatgcgttctcagaggactgtgtcctgagcctggaaggacttttgtcttcttaaatattgaagcattcactgtaaacttcca

SEQ ID NO: 35847 - DNA, 120 bp, Homo sapiens
cctcgtggatgctgggctgtcatgctgggcacagtcctgcccccacccagccatgccccctgtgccatctcccctcaggctggaccaccagaccctcctccagggcgtggtggtgctgga

SEQ ID NO: 35848 - DNA, 120 bp, Homo sapiens
cttcgtcaagtttcccccacatgatcctcgccagaacgtctccccagccccggaagggcaggtctgagccagcaccagggcggtgggagactcctgtccacacctctgccccagagctgc

SEQ ID NO: 35849 - DNA, 120 bp, Homo sapiens
tgccgccacactcccctcctgggatggggcttctgctcccgggctcactcaaggagactgcggcatgttgaccacaccagactgggtttcagggaatgggcatgccaggtgccaaggagc

SEQ ID NO: 35850 - DNA, 120 bp, Homo sapiens
ctccgagactggtcaggagcccaggccagtgagatggggcctggagccttgtctgtgtcacattaggtaccatgggagctgctgagacctgacattttgtcccctgcctacatggcttgg

SEQ ID NO: 35851 - DNA, 120 bp, Homo sapiens
gatcgtcggggaagcccctcttcctgctctgctcccctggaaactgttgcaaaactcccagccgcctcatggcaaatgcccaaagcatgttccgcacccaggcgggggcccctgctaatg

SEQ ID NO: 35852 - DNA, 120 bp, Homo sapiens
gagcgggcccaggagccaggctcaggtccagctggttcctctctggcgccttctgaacccgtctcagcaggtccacagcacctgggcagaggtcagagaccaggggaggccgggccttgc

SEQ ID NO: 35853 - DNA, 120 bp, Homo sapiens
ggacgccccctgactccaggcccctgagcctggcgggaagtggctgcggcccaggcagccagtcctggtggtgttctccctgcatgccctccgtggctgggctgccaccccacccggccc

SEQ ID NO: 35854 - DNA, 120 bp, Homo sapiens
gcccgaatctgtcttgacctgcaggaatacacgggcggcgccaggcattacctcacagcgggactacacagttgctggctttgctcctgggcaaggaggagcaggccagagcctcttttg

SEQ ID NO: 35855 - DNA, 120 bp, Homo sapiens
tgccgcttctagaagccaggcacaggttgccaagaggtgacacgaaacaggaggaaactcagtgacctctgcctctcccacattcctccccgcgggggaggacctcgccgctctgaagag

SEQ ID NO: 35856 - DNA, 120 bp, Homo sapiens
caccgtgcacatgtgggtgcacaaacgtgggtgttggtgtggacggggcgcagatctccgtggatgaactgcgtctggactcttagattcataaaatattcgagggtttgggagtcacag

SEQ ID NO: 35857 - DNA, 120 bp, Homo sapiens
gcacggtgtcttccccggacagcacagcaataaatggtgtgattgcgtggacaccgtggctctgttcttggccaagtttccccaccttctgcccaggactccactgctaattcgggccca

SEQ ID NO: 35858 - DNA, 120 bp, Homo sapiens
tagcgctgcagcagggaggtggggtgggcggtaaacagacaggctctggcagtgcagatctgctgatcctcagcgcctgccaggagccagactcttggcggagcagtgccacttctgctg

SEQ ID NO: 35859 - DNA, 120 bp, Homo sapiens
cagcggagagtctgcccaccccggagacaccatgagggaatggaccacgtgggagcatctgtgtgcaagtctcatttgggtgtgtttatgctgcgtgttgtatgcctgttttagtcataa

SEQ ID NO: 35860 - DNA, 120 bp, Homo sapiens
ctgcgggagggcaggctgagaacgtggaggaaaaggagccagatgttggctctcaactcgtgttgatcactgggtggctttttaaaatcccaatgcccagtgccccatcaccagttaaat

SEQ ID NO: 35861 - DNA, 120 bp, Homo sapiens
taacgtgtgcccagggttggaaactactaggctaaataatgggggcaaatagccaaatgtcattgcccggctgactggatatgggccagtgggtcccttagacactgagagaagtgaact

SEQ ID NO: 35862 - DNA, 120 bp, Homo sapiens
ctgcgccagggaggctcaaggagagagcagaggcagcacctgcagctcctgtcccacttgaagttcctctggggccgcccactgcccaacccttggagggctcagagctgtgtttcatta

SEQ ID NO: 35863 - DNA, 120 bp, Homo sapiens
tcccgggccagcaggccaactggagggagccccaggggccgtgctggacagcagactggcccgcactgtcagtgcactgggaaaggcatgggtgcctgtgggtaacacgaggggagcagc

SEQ ID NO: 35864 - DNA, 120 bp, Homo sapiens
agacgtgtaggcagggaggcaaggtgagtaacacctctttactcagcaacgtgctcctccctcgggggaccttccccagtgcccctccatgctcgaagggcctggaaggatcagaatgca

SEQ ID NO: 35865 - DNA, 120 bp, Homo sapiens
ggacggcacagaacgtgatgaggagatgccactgggggtgcagaaagctccccatccccctgggaagaggcgtcagcgtgccctcagggtagtcaggtcctgagctttggactcctcgct

SEQ ID NO: 35866 - DNA, 120 bp, Homo sapiens
agccgcccctgctcccaatgcaacaagatccctgatcgccagcctcttgcctccctcagagggagacaagtccgcactggagggagcacggctgcctagctccctgtcacctcccccacc

SEQ ID NO: 35867 - DNA, 120 bp, Homo sapiens
agccgctggaggagctggctttgcaggtcttcctccatcaccttccaccaagagaagttctcaccccgaacttttgggggttcatcctggatccctgggctccgaaaagccacggtcacc

SEQ ID NO: 35868 - DNA, 120 bp, Homo sapiens
tctcggcccaggtgctgcagtccaagcaaccccttgatctccaccaccaagtggtgcagggtcagacactcctgcagcagccgcaggacggccatcttcatgccacccctctgctccata

SEQ ID NO: 35869 - DNA, 120 bp, Homo sapiens
ggtcgaggccacaggcagtgacaggcaagtgaggcatccccactgtgcccactaacacccacactgtctgggcgctggtaaaggtagccacgagccgctggcagaccagatcacagggta

SEQ ID NO: 35870 - DNA, 120 bp, Homo sapiens
tggcgatactgggcggctagttcaaccaggtgcaggatgtcatgggctcgcagcggagtgggcagggaggtccgtgggtaccaggcagcctgcagggactccgcatcggcctccttggaa

SEQ ID NO: 35871 - DNA, 120 bp, Homo sapiens
caccgaggagctgggggaaaggtgtcaactggccctgttcacactgcctccaggtgggccatacctgtggggcgagcgaggaacacgaagcggacccaggaggggccccgctcctccacg

SEQ ID NO: 35872 - DNA, 120 bp, Homo sapiens
tctcgggctcacagtgcagccccgcctcctccttcacctcccgctgcagcgcctccacgatggtctcccctggctccattctccccgcaggcaggtaccacgacccccggcactccctct

SEQ ID NO: 35873 - DNA, 120 bp, Homo sapiens
aagcgggagagggcggagcgccaccaggaggctgcgggcgtggagcggggacaaggaggggtcggctgtctgaagcagtcaggctcagtcccagggtggctgggcctggcgtcggccatg

SEQ ID NO: 35874 - DNA, 120 bp, Homo sapiens
aggcggggcaagggctcttctgggccatacttctggatctccaggtcagggtagacgggagagatggggcggactggagcttgctgggtggagtagggctcgggagtctctgcacaggga

SEQ ID NO: 35875 - DNA, 120 bp, Homo sapiens
cctcgtggctgtgccccaggactctgccttgcctgctcttgcactcaggagcatctttgggggacagccccccaccccacccaaagtctcctcagtgggaggcaaggccccaggccccag

SEQ ID NO: 35876 - DNA, 120 bp, Homo sapiens
agacgaagagcaggcagtggtgtcctgtcccttgggccccagctccgggctgccctactccatttgtctctaaggcagatttccatgtccccctccctccctggaccatgtggcctgcag

SEQ ID NO: 35877 - DNA, 120 bp, Homo sapiens
aagcgggcggaccgggaaggggctgagtgacatcgcccatgccgctccctccgccaagcctgagcagctcctgatgccaccctctcctcacactccccagatcttttggcaggagggcag

SEQ ID NO: 35878 - DNA, 120 bp, Homo sapiens
atgcggtggtagaaacggagctggggcagtagagtgggctcagcgggagtgagcagcaggaggaggtgttgtttaagccagaatgattcccaagtttccccaaggaagggctgtttgtct

SEQ ID NO: 35879 - DNA, 120 bp, Homo sapiens
tctcggaggagtggggattggaggaagtcaattgcccccagtgcgggcctggtaccatgaaaaggggcacagggtgggggagatgccagcctgagaaggacaggtgtgagcttggtggca

SEQ ID NO: 35880 - DNA, 120 bp, Homo sapiens
tagcgccatcccctgctgaagttgtgcctgggctgagcacctggtctacctgtccccaccccgatcccagacacctagcatccctctatttggcctcctgtaatgtccccacggccacct

SEQ ID NO: 35881 - DNA, 120 bp, Homo sapiens
gcacggcctctccgggggcctggagcagggtccagcagctcacgccccactcctcccgcaggcgccgccgcagccctgcatccaggtagcagctgcctggggcgccaggctccagggcgc

SEQ ID NO: 35882 - DNA, 120 bp, Homo sapiens
ccccggccgggcacacctcaaagaagagaagggggaatgagcgagatggggagggaagggcagggctgcaggaggatggggcatggactttccagaggccaggggtggagaaaagagccg

SEQ ID NO: 35883 - DNA, 120 bp, Homo sapiens
cctcggcccctctcctccctctctcaatggtacccctttctgcaaatccgagggagacgtcctgcataatcccagttcataaactgtctaccaggacttcttcatctgaagtctttggaa

SEQ ID NO: 35884 - DNA, 120 bp, Homo sapiens
ttccggatgcagaaaagggaaggaccactgcgaggctctgagtgccagcaggtgaacaggctttccggccaggctgaggcctctgcagcagccacagctacggggacctcacaagcctaa

SEQ ID NO: 35885 - DNA, 120 bp, Homo sapiens
actcgcagaggacagaggtgcccagggaacatgtgcaaaggggacgccagcatcgtgctccaacccaccaccagcccaatccaccccctttggcaaggacctcagccattgcccctgggc

SEQ ID NO: 35886 - DNA, 120 bp, Homo sapiens
gggcgtgggggaagggaaggctggtgaagcaaattggaccctaggggagtcccagctgggtgccaagattcctttgcccttggagattcagctccatcctggagctgagcagtgtttccc

SEQ ID NO: 35887 - DNA, 120 bp, Homo sapiens
ccccgtgagtcactgggttgggccgtagtgactgcccacggccagccacacccagcccagaagaggccatctgtgtgtggaggtgtgcttgtctgctcccctctgcgtgtcccagcatct

SEQ ID NO: 35888 - DNA, 120 bp, Homo sapiens
gcacgtctccgtgtgtgtgtgtgccttggcgaggggtgacactaggtggaagtcttttccccaggataatgagggctcagctggacttgggaaccacggggctgccctcgccttacccct

SEQ ID NO: 35889 - DNA, 120 bp, Homo sapiens
ctgcgcctcaagcttcttgcctccagcccaccccatcaccttccccttccctggctcctcacctgacccatctctccctccacttccctcagcccccttccttgctagcccctccgggag

SEQ ID NO: 35890 - DNA, 120 bp, Homo sapiens
agccggacggagtctcagaaggcagaggaggctgcctgcctccaggaagagcatagagtagtgacctggggccatgacagacagaagctcagatcccagccctgccactgagcttcggtg

SEQ ID NO: 35891 - DNA, 120 bp, Homo sapiens
gggcggggggctgagacgggtaacagataattgtgcctaaggccctagcaccacgtccagcctcgggcagctggtgctctcatttcatcatcgggtccaggctctcctgccgcagcccct

SEQ ID NO: 35892 - DNA, 120 bp, Homo sapiens
gggcgcaccccgggcatcatggtgagaccagcaccggggcagtagagggcagagctgggtaccccggttgccccagggatcggaggagttggagtggagccagccaggcaaacagccttg

SEQ ID NO: 35893 - DNA, 120 bp, Homo sapiens
ttccgccaggcccagcagggcgaggctctggccagtctcccaaccccaccctccttgacctggaagccgggggcagcccagatcccagacactgctgccctctcgtggccactcctcaga

SEQ ID NO: 35894 - DNA, 120 bp, Homo sapiens
ctgcgggtacctgactgtttacagaacttaatgtccccagagctgccccagggggctccttcttccaggctcctggaggagatactcctccccaggtctcctctgcctagcttcgacctc

SEQ ID NO: 35895 - DNA, 120 bp, Homo sapiens
taacgtgctgccccaagcccctcctgcctgtgctcccactggtttctctatagctgcaccttcctgccaaggcctaactgaagtttcgggttctgaccagtcctctggactcgtccccac

SEQ ID NO: 35896 - DNA, 120 bp, Homo sapiens
cttcgtgaaaccatgtgctgcatcacaactctctgtcaatggttctgtctcccccagaggactgggctccttcagccttagacctaggctaggactgggctgtcccatttcaagggtgtg

SEQ ID NO: 35897 - DNA, 120 bp, Homo sapiens
aggcgagcaacgggagtaagaatcaggagaaacagagcccctttatgtatttatttatcaaaacactcgcaaacctgacctcactcaccaacacacacacacacaaccaggacacatgtg

SEQ ID NO: 35898 - DNA, 120 bp, Homo sapiens
ggacgtttggtttcatttgcaggggttcagggagggttgcaggggttcagggagggctcttgtcccacaaccggggaagggagagggcagagcaaggcaataaatagaaccctgggccca

SEQ ID NO: 35899 - DNA, 120 bp, Homo sapiens
tatcgcacccaattctctggggtttccagagcagccaagcccatccccgcatcccacttgcttggcttctctgtgccatccctagctgtcctcctgctgccccgactcccctgactcaag

SEQ ID NO: 35900 - DNA, 120 bp, Homo sapiens
ccccgtcttttgggtacatcctatcagaacaaaagcaagggacacctgcatcttcgtctgcagaggctgcctctgtccactctccctctccccagcccaggatttgtcccctgctaccac

SEQ ID NO: 35901 - DNA, 120 bp, Homo sapiens
cagcgggaggtgggagaacgctccatcctggatctctgagaaggcggcattcaccagggtcctgcggggacacccgagtcagtactgtggggtctgcaagggctgtgctgaggcagggag

SEQ ID NO: 35902 - DNA, 120 bp, Homo sapiens
acacggagggcagtagcttttgtactcacttgccctggaaatgccccatttcacctaatttagcccccatctgtgtgtctttcccttctcctcccaaattcactgcctgccttcaccagg

SEQ ID NO: 35903 - DNA, 120 bp, Homo sapiens
caccgttgtcatcatcatccaaacacccacaatgggctgggtgctgttgagagatggggcatgggggtgggggctggcatcctggtccccaaggacctcacaacctctctggtcccacag

SEQ ID NO: 35904 - DNA, 120 bp, Homo sapiens
ggccgagctgagtgccaagtggctggtcagtggcgggcatgtgccccatgccagggtgctgggagggcatagctcattctcatcctgctctggccgccactctcctgcccttggtgtgac

SEQ ID NO: 35905 - DNA, 120 bp, Homo sapiens
gctcgtgtaagcaacccccccaagtctggagcacagcacacagtaggtctcactgtcgctcgtggtgatgatgattcattcttggtggtgaactcctgctttccccacccatggccgctg

SEQ ID NO: 35906 - DNA, 120 bp, Homo sapiens
gcccgactggtgcctggaatctccagccctgaggacccctgcagtccccctggtccccgcactctgaagagggggagcgggggttctcctgtcctctcccagagctgtcctcggcctcct

SEQ ID NO: 35907 - DNA, 120 bp, Homo sapiens
ctccgagggcaggttcctgggcaccgcctttgagtccacgcagaaggcggtgtccctggtgcaagagcagctgggcgggcaggggggcgtcttggggggcctcttagcgctgacttgcag

SEQ ID NO: 35908 - DNA, 120 bp, Homo sapiens
agccgagcgcggagagcgccagcagccccggccccgggccccccctggcccgcagccccgccatgctgcccgcgatctctccctggggccggcggccgcggcccccgccccaccgctccc

SEQ ID NO: 35909 - DNA, 120 bp, Homo sapiens
taccgggcggtctctggggccatccgcgtgtggggctgcgcgtgagtgcatgcgtgtgagcttgtgcttgtgcctctgctgggcacgactgtgcgcgccggtgctcacctgtctctgcac

SEQ ID NO: 35910 - DNA, 120 bp, Homo sapiens
gcacgggcacatgcactcactgccttgtggaggcgcttcggcgttagggatccctgtgcttctgtctacctgggtttctttgcatggggggacacatcccctaggcagcatcatgggcat

SEQ ID NO: 35911 - DNA, 120 bp, Homo sapiens
tgtcgtgagtgacagacgcatatctaagttagcatgcaagattagaagcacaagggcgtcctggaggagtctgaagtgcgcttctaaccggattcacatgtttttccacgcgccgctgaa

SEQ ID NO: 35912 - DNA, 120 bp, Homo sapiens
aaacgcagcctctggagctggagtgggactgtgtggaattctggaacatttctcacgctcaaccacagcctgttaaagctgggaagcgctttggatatttttcagtccagccctttgtct

SEQ ID NO: 35913 - DNA, 120 bp, Homo sapiens
tatcgcaagtgctctgtactttccctacttaatcctctcaatcgtttgaggcaggtgatagtaattcccttttacagacaagaaaagtgaggcctgtcgcaccagaagaaaaaggtatca

SEQ ID NO: 35914 - DNA, 120 bp, Homo sapiens
ttccgcccactctgcccagcttcaaggttcacggtcgtccttccatgcacggctcttccaagtgtagccctgggagcccgggggtccttgagaacctttcaggaagtctctgaggtaaaa

SEQ ID NO: 35915 - DNA, 120 bp, Homo sapiens
aatcgtttttccattaaaaatgtgatttatgtcataacctatattgggtttattactgatattttaaattcacatgtaaataaaaatgtaatttctcagtaaatatcaacagacatatcc

SEQ ID NO: 35916 - DNA, 120 bp, Homo sapiens
ccacgttagctcccctgtggcggaggatgactgtcctaagagctcataggcacggggcaaggggagcctggctgtcagctgcctgggcttctagtcttgtgctttttgcacaccagtcca

SEQ ID NO: 35917 - DNA, 120 bp, Homo sapiens
ctccgtgtcagatcaaggacccgcatccattgtggagctcctctgggaggctgggccaggtcctggtcctggacagcggtagcccgggcagcctctagggtggggcatgggcatagtggg

SEQ ID NO: 35918 - DNA, 120 bp, Homo sapiens
ggccgtcctggggactgctcaggcctttctccccacctttgcccactatctgccctctgcctggtctgccctccgagggcttttctctcattttctcgatgtctctgtccctcccttccc

SEQ ID NO: 35919 - DNA, 120 bp, Homo sapiens
tcccgcctcctccctctctcccaggcgttctccactcttcactgctccttctcagctgtggctctagaaatggtgcttccttcccatgttcccttgagtcctccattcaccaggccctct

SEQ ID NO: 35920 - DNA, 120 bp, Homo sapiens
ccccggaccctcaggtagggggactctctcagatacaggaaggactccattccctgccctggaaagtgagcgttgcatcccaggcagacccaccccctcctctccccccacacccttttc

SEQ ID NO: 35921 - DNA, 120 bp, Homo sapiens
cttcgacagcatcatgcattacgctcggaacacattctccaggtgggagacgggattggggctgggcctctgctcgggcagccccaccctgccctctgtaggctattctcctcctgcctc

SEQ ID NO: 35922 - DNA, 120 bp, Homo sapiens
gtccgtggatgttgcctgccctcctgtcctcttccacgggtgggtctgtggcagggccttaccaccgtgtgcacccagggcacctggcggaggaggctgaacccagccactctgcaagcc

SEQ ID NO: 35923 - DNA, 120 bp, Homo sapiens
ctccgaagcacatcctccttatctgaggcccaggtccccagaagccacaaccagagccctcaaaggtggtggcccagcctcccctcccccaagattctccttagcagtgtgggaaatggc

SEQ ID NO: 35924 - DNA, 120 bp, Homo sapiens
acccgatctgctcttcctgcctgcagacctgcaggaacagagaccaaggaagggtggtgaggtcattctgccccccacacccacagacccggccttacatttcccaccacatcccacccc

SEQ ID NO: 35925 - DNA, 120 bp, Homo sapiens
ctgcgatccacccagctgggtgtgagtcaggggccctggggaggtggagggctgcctgcctccccttcactctgctcctcccagtgcaaacacccaggattcagcagggaggaatggcca

SEQ ID NO: 35926 - DNA, 120 bp, Homo sapiens
ccccggggcttggtctggctgcagtggaatctgcctttggccttgttccaggtgctttcagatgcagcctgtgccagcagggtgaggagctggcctggggagtcctgggagaagtttagt

SEQ ID NO: 35927 - DNA, 120 bp, Homo sapiens
acccgctaggggcctgtagctttcctggggctgggagttgtggccagcctgagctgggagcaccagtgggtccaagggcaccctggacctgcatccctgacctcccaaagtgttcctggg

SEQ ID NO: 35928 - DNA, 120 bp, Homo sapiens
ccccgactcctgtggtgtggctgccacggagcagggtggctgctggtcagtgggtagcataatgacagggtgagacgactccacccggccctgaccctgctgaggaatgtctgagctcca

SEQ ID NO: 35929 - DNA, 120 bp, Homo sapiens
ggtcgtgacttgtgggtacagatgggcatgccacccactccctgcccactgtccatgagacgctcacccttacttttctccctcttcttcaggggcatcttcctggataccattgtcccc

SEQ ID NO: 35930 - DNA, 120 bp, Homo sapiens
agccgagccacaggcccaagtcaccagcccggaagcggtggggcaggccaggttttctctggcaaagggcattgcccctgccaccagagcacagctgtttccacacgacagaagccagta

SEQ ID NO: 35931 - DNA, 120 bp, Homo sapiens
gagcgatgtgacctctggttcctcctacttctttggagctctcgggtgggccctctggggttctgccggctgggcgtggtttcttcctcagcagctgtgacgtcatcctccccagacaga

SEQ ID NO: 35932 - DNA, 120 bp, Homo sapiens
aagcgggcgcttgtcctcagcacagctgctgagcagaactgcctggcaggcccaggaaggccacgtggaggagtggtggagggtgtgagtcaggagccagagcgccctcactcggccctc

SEQ ID NO: 35933 - DNA, 120 bp, Homo sapiens
ttccggcccacctccctctggccggacagaactggtgctctcttctccccactgtgcccgtccgcggaccggggacccttccccgtgccctaccccctcccattttgatggtgtctgtga

SEQ ID NO: 35934 - DNA, 120 bp, Homo sapiens
ctgcgtcctgctcctttctcttgcagtctgcttgtccatgtgtctatttttccacttgtccatctgtccagtaagcaggtaatggtgacccatgctggtccgctcggacccccatcctcc

SEQ ID NO: 35935 - DNA, 120 bp, Homo sapiens
tgtcgcctggcctcccactcccggccacctggcctggccagctctgccagctgttgctctgtcccggtgggagaaagtccagccaggcctccacttcccctggggcatcccaacctcagc

SEQ ID NO: 35936 - DNA, 120 bp, Homo sapiens
cagcgtctgcccttatttgctcccctgcagacaaggacgagtgctccaaggataacggcggctgccagcaggactgcgtcaacacgttcggcagttatgagtgccaatgccgcagtggct

SEQ ID NO: 35937 - DNA, 120 bp, Homo sapiens
cttcgtcctccatgacaacaagcacgactgcaaagaaggtacgggctgcatgccaggggcatctgggcttgaaggacctgctgctgggagtggaagcccagaggatcatctccatcagcc

SEQ ID NO: 35938 - DNA, 120 bp, Homo sapiens
ctccgtttagattctggggcctgtatgatctctaaggccccctcattcccccacccacctggtacatagatcctcctcccgcagtgtcggagccacacgctcacttctgttgcccacatt

SEQ ID NO: 35939 - DNA, 120 bp, Homo sapiens
tcacggctgctctgaggcttcattttcagacttttctagtttgtgcttcttaaaaccatgtccaagtctctttgtgacttcctaccggcacagaggcgagaaaggatagtgggtaagagc

SEQ ID NO: 35940 - DNA, 120 bp, Homo sapiens
tgccgcttcactagctgtgtgcctttgagtgactccttgaccctctctgtgccttggtttgctcctgggtaaaatgtagataataataatagtacccacctcagagaggcattgggagct

SEQ ID NO: 35941 - DNA, 120 bp, Homo sapiens
caccgcaagcacaatggcatctgttaccactatcagtcacacttataacccctggggatggtcagaacagggccactgccttcctggcagtgaagccctgcacacatttaaaaatagctc

SEQ ID NO: 35942 - DNA, 120 bp, Homo sapiens
acacggctgtatatgcctatactttcagggcaggagaggattttccaagcatgttactaaaagcagaaactttaaaaaggaaaagtatgacatatttgactttacctctttaaaaattgt

SEQ ID NO: 35943 - DNA, 120 bp, Homo sapiens
tgtcggcagtatgcatcattaatttattctctgtagtgtcagtaatgggtgcatgatacaaacatttacaaaagttcttttgataagtcttccacaaggctcaattcctatctttagctt

SEQ ID NO: 35944 - DNA, 120 bp, Homo sapiens
aagcggaaaccacctgtggatcatgggactataggctttagttgatttattatattaaccagcattatcagaatggaagggagtggaatcttctattgcagaaagtacataatgaatttt

SEQ ID NO: 35945 - DNA, 120 bp, Homo sapiens
gagcgggaggggaaagctctagagaggaaagtgattcagctagctttgaggcagtgttttgtagtgagtcattctttgagtcctgaatccttttttttagcctcaaaatatcaatgagat

SEQ ID NO: 35946 - DNA, 120 bp, Homo sapiens
atacgcatatcttatttggagtatattattttctaactgtggtcttttagtttaaggaacaacagactgtttgaatgatccttacgatgtttgaacatgttaccggctggaatcccagaa

SEQ ID NO: 35947 - DNA, 120 bp, Homo sapiens
aaacgcaagcacagatgggaaaataaagtacccacttaccaagaaggacgataagaagccttctccaactgaaagaaaaaagagagatcccaaggcctcaacccaaagggaaaaatccct

SEQ ID NO: 35948 - DNA, 120 bp, Homo sapiens
agacgggaaggggaaagacaccatcccatccaaatcccagataaaacagaactcaaccaaaatcgggagttcagtccaagaatgactcactaagggaaaaagaggcaacttgcagaagcc

SEQ ID NO: 35949 - DNA, 120 bp, Homo sapiens
agccgttagaggagggggtgactttcagaggtccccagtgtggctaccttgtactatagttccaatggctgctgatcttctctgagatgagtcagccttagactcatacttgaccaagta

SEQ ID NO: 35950 - DNA, 120 bp, Homo sapiens
aaacgaaaagattagctcttttgttacttttttttgtggtctatgtggcctttgtgcgaaaagcaactaccctgggtttaacttgttcaattattctagtgttgcctttgttctagcatt

SEQ ID NO: 35951 - DNA, 120 bp, Homo sapiens
agacgtgtgctccatagccacctttctgtgtgtttctctaggaggttgctgtgtgctaagaaactttttttaagcctgttgctttgctgcctaattgagctctctccacctgcttcctgt

SEQ ID NO: 35952 - DNA, 120 bp, Homo sapiens
tctcgcttcagcacaagatccggagttttgaagaagcgcgaggtctggaccgaattaatgagcgaatgccaccccgaaaggatagcatacacgctggtgggccaatgaaatctgtaacct

SEQ ID NO: 35953 - DNA, 120 bp, Homo sapiens
ctgcgcacaggagcgaccaagggaagaaagcccattcatgacttagagtcctgccgtggctcaggtggatctaaaactcaagaacaaattctatttatttattattggaaaatgaaaagc

SEQ ID NO: 35954 - DNA, 120 bp, Homo sapiens
ggccggcaagtgaaccagggccacctctgtccccagcctgtgagaggagcagctagccctgagaagggcaaggatgaatgaggctgaccacgtcacaggagtcctccaagagtgacgggg

SEQ ID NO: 35955 - DNA, 120 bp, Homo sapiens
catcggccacaatggagagggcccggagctcactgagtttggcctcgttctcccgctcccgctgctcatcggagtggcctggctggtcaagctgatgggacaggtctccaaagatcttgt

SEQ ID NO: 35956 - DNA, 120 bp, Homo sapiens
ttccgagtagtacacaacctgggggaggcgacaggggttggcacgtgctggctccagggaaccgtgtgcttcagggggccagaggctcacacttctctgctaccccctgcccttacccat

SEQ ID NO: 35957 - DNA, 120 bp, Homo sapiens
cagcgtgcctttggggatatgcagggcacggaagggctctagctgagactgaaccaaaaggagccggggagcaacagggcctcagtggctggaggtggaggcgcccctgcttcgggctcc

SEQ ID NO: 35958 - DNA, 120 bp, Homo sapiens
gggcgactgtggaatgatgggcaccatgactggagttttactgctttttgtaagctaggggagaacccaaggcttttgtccatggcagaaagacagcatggtaggctgatggctcccaaa

SEQ ID NO: 35959 - DNA, 120 bp, Homo sapiens
gcccgtctagccttctgttccctcccaacttgcatcccacccttgctcatggcccaagctgcgtggccagggggacagctcagaggccaggttcactgccagggtccctctagggaggca

SEQ ID NO: 35960 - DNA, 120 bp, Homo sapiens
gcccgtcaattctcccagatggctgaggaccaggggcttttccacagacaataggggccacttctgcctcagtttctacctcatgacccaatgaaagcatgcagtttcctgaaagcttcc

SEQ ID NO: 35961 - DNA, 120 bp, Homo sapiens
gtgcgctgagtcactgggaatactcacttctccatgactaatggcagccgggcgggcgagggggaggctggggcccaagaggcagtcaacagcccccagcaatgctgcctggttaaaggg

SEQ ID NO: 35962 - DNA, 120 bp, Homo sapiens
acacgcgggagcctggcaccctgtggcttcctcctgtgagcaacaggagggagggtgcagggcagcacccaggtgacagtgaggaagaggcaggcccaggtctcccgtgaacccaatggg

SEQ ID NO: 35963 - DNA, 120 bp, Homo sapiens
gggcggctggagggagccctcgctgcaggagcaagtgtcaggagaagtccctacctcctcctgcagaaggctctaggtctcactgccccctaaagatggcacaggaccaagtacgtgggt

SEQ ID NO: 35964 - DNA, 120 bp, Homo sapiens
agtcgcccatggcgtgggctggggtgagactgctgggaggagctagacttgatgctttgcccagggcggctgcgtggtggagctgcagctgctggggagccctgcccccttcctgggcag

SEQ ID NO: 35965 - DNA, 120 bp, Homo sapiens
gcacgtgttcaggcagcaggtgcagctgggcctgagaggctaccaggccacctctccctcagccccaaatggccaagggaccaccggcagctaccctggtcctcgccctgatccttgtgt

SEQ ID NO: 35966 - DNA, 120 bp, Homo sapiens
tgccgggtaggtgcaggcgctgggacagggcaaggatgaggcaggcaggaggcagcaggtggagagctctctggccctggccccaatcccaccaccctgagctcacatcctcaggaagga

SEQ ID NO: 35967 - DNA, 120 bp, Homo sapiens
cagcgtgaagccgtgtgtgcgcaaggtggcttccacggtgcaggatgggaggagccctatgctcgttgctccagcagcctgaccccccaacatcccctgaggcactctcatagccccctt

SEQ ID NO: 35968 - DNA, 120 bp, Homo sapiens
tgtcggctggggcttattatttcctgtgccagagtcagagccaccaggagcgctgactacagcggagtgccgagcgggggtgagggaggccgggttacagagctcctcgggggatggcgt

SEQ ID NO: 35969 - DNA, 120 bp, Homo sapiens
ggccgcctgccccagtgggaagagcatgtcttcaccatgaaaacctccgtttcccatgacagcaccccttagccaccaagaggctctgcctgctcaggccactggaggtgattgctgata

SEQ ID NO: 35970 - DNA, 120 bp, Homo sapiens
ccacggtggggggaggttgggtcctgggattgggattccctaggggtagggacaagtgtcacacctttctacattcagtgggaactcacatcagtcagggcagggcgcagcttgtgccaa

SEQ ID NO: 35971 - DNA, 120 bp, Homo sapiens
ccccgttttctacttcttagcaacagaacagactttgccaaagccccggggtggacagtggatgtgccacggtgctgtgtgggatctcaggtcagggctcaggctgctggcaggggaggt

SEQ ID NO: 35972 - DNA, 120 bp, Homo sapiens
agacgtgcacaggctgggcgcctgtgccagcccctcccagatatgtccctgggaccccacagaggccctgctgactctacccaaccacactgggggagcctgtccccaggcgtgaagcca

SEQ ID NO: 35973 - DNA, 120 bp, Homo sapiens
cagcgcacttcacccctcctctctccctgcccacctcagcccaccaaaacctcctctcccactcctaggtgctgactgtcccattatgagaagtcagtttggctttctctttccacatgt

SEQ ID NO: 35974 - DNA, 120 bp, Homo sapiens
ctccgaggccaggtgggggcaggtcagacagcccaccgagcatgccccgctccatggtcctgcaccacgctggcagctgccacacctggccgctgacctgagaacacgctgtggctttcc

SEQ ID NO: 35975 - DNA, 120 bp, Homo sapiens
ggccgggctgggcccaggccagtgatcaaagcattacccatgatcactgcccaattcttgtctgtcctaaggctcaatatcaaactcactcccctggggatgggaggggcgaagaggaga

SEQ ID NO: 35976 - DNA, 120 bp, Homo sapiens
gagcgaggccggctgggaggtgggctgggcgcagccagcactggtggggaatgcctgccatgccttggtctgtgcccacgcagccgggagcttccacccaccaggaaagggaaattgaaa

SEQ ID NO: 35977 - DNA, 120 bp, Homo sapiens
atccgacatgtgaatacggcccagagactggggattagaggccgagcccctgcagggaggctgggggcggtggggtggccatgtggccgtgatcttcatcagaggacaggaaagctggag

SEQ ID NO: 35978 - DNA, 120 bp, Homo sapiens
ttccggtgctggggtccctgggagcttctcttctggcaagaggaagccaatgggaagaggctgtaggctgcgcggttttatgtggttgggggagatcgtatgtcagctgtggggatgcag

SEQ ID NO: 35979 - DNA, 120 bp, Homo sapiens
cagcggatccgctgcggagatgtgcgccccctctgccacgcccccaccttcctggcaggtggtgggccaccagggtggtgggaagtggccggggtttctctccatttgggcttcagaagc

SEQ ID NO: 35980 - DNA, 120 bp, Homo sapiens
gggcgccttgctgatactgaaactgaggtgggagtcagttccccagttctctgagtccctgcctcattctaccagccatgggtgcctgtggcagcctctgtgtccgtctctgggacccct

SEQ ID NO: 35981 - DNA, 120 bp, Homo sapiens
tcccgaagcccaggaccaaaacccacagccacggagctctttctgcaccccagctccctacgcaaccctgtggcatggggctgcgctgtccccagcaggcagggggtggtggatgcccac

SEQ ID NO: 35982 - DNA, 120 bp, Homo sapiens
ggccggagccggaggcacagtcccttccctccctgccttcgctgagcctccacggtcctggcttagaaacaagagcttgctagggtcaggcgggccttttcctaatcccatacttcaggc

SEQ ID NO: 35983 - DNA, 120 bp, Homo sapiens
caacgaacagctcagcaatccgaaacaccaggggctgcaggatcaaaaactgctcctctcattgccgtgtgggccctgggccaggccagtgataattaggcagagcctcattacccggcc

SEQ ID NO: 35984 - DNA, 120 bp, Homo sapiens
caccgcagaagaggcaaggaagtgcagctgggcgaacaggagctttctaggtcacagcctgctcgagagaggccagggaagatgaagtgattcggggctttaaggcacggctctgcctgt

SEQ ID NO: 35985 - DNA, 120 bp, Homo sapiens
ccccgccctggggaccgagggaataggcctgtctgatcactgaccagggcctgcccaacagaagatgagcctcatagaagcattcctgaccccaacaggtcacaagctagaggaccttcc

SEQ ID NO: 35986 - DNA, 120 bp, Homo sapiens
tcccgggccagaccccgctgccacgcccctccctgtgtgcggccacccccacgtttccagagccgagtgctgcaggcagctgctctcccaagctggcggggcaagatgaaaggccttgct

SEQ ID NO: 35987 - DNA, 120 bp, Homo sapiens
gtccgctgagggctggccaagatctctgctagctccattcagcaagccctggccccagtggctctcaatcaggaggaagcggtcaaatgaccaccagaacagcggcggttgctgggtggg

SEQ ID NO: 35988 - DNA, 120 bp, Homo sapiens
gctcgcctgggccatgtgggtactctggagcccccaggagcatggacgcttaggccacaggtcacagagctgacgtccccactgagtttcccgtcaggccccatgggaatctggggacac

SEQ ID NO: 35989 - DNA, 120 bp, Homo sapiens
acacgcagctagaaatcctcttcagtccccaagtggctgctgacctgcctctcccataagtgccccgaggcccccaggtgacatttactcacttttttaagggctcgatcacagtcttct

SEQ ID NO: 35990 - DNA, 120 bp, Homo sapiens
gggcgacacgcaaggcagggcccctaactaccaaagggctaggaagtctaaagggccacagggtgctgtccttgtcctgggcctggctttgctcagggtggaggccgggtggctggccac

SEQ ID NO: 35991 - DNA, 120 bp, Homo sapiens
tgccgccggcaaccctcacagtaagtaacatgagctcgtggagcctcaggaggcaggtagagccaaggcagaacagtctggaaagagccctgtgggcttgcagcaccttgcagcacacga

SEQ ID NO: 35992 - DNA, 120 bp, Homo sapiens
actcgggcctccccgcacagtccacccagaggcccagaccgggcagaagtcatgcttgcccaccccacaccaagacctagtcaccttttcctgattgaaggcatccatccgcttcatggc

SEQ ID NO: 35993 - DNA, 120 bp, Homo sapiens
ggccgtgtccagggccgtcaccatgttcagaaggtcctggtcttgctcacagaggggattggagagtaagtccaaggatatcttcacggcagattttgacatggctgtgggaagccaaag

SEQ ID NO: 35994 - DNA, 120 bp, Homo sapiens
cagcggagtacagatgctgatgaaggtcagaagagcggcacccagtgcagcatggcagggtgtgaggggccactcagggaagaccctcagagaaggtgaagcgtggcctgactcttgaag

SEQ ID NO: 35995 - DNA, 120 bp, Homo sapiens
gcacgagagagcaggagaagcttggaggatggaacacacggagtgaagatggacagccaggcccagagggcctcagaagccctggcccagagttgggcctctatcctgaagatgatggca

SEQ ID NO: 35996 - DNA, 120 bp, Homo sapiens
ccccggaagagtcagaaaaatatcactccactcatttcacagcaggctcaggtggcaaattgtcagcaggaatggccactccatgctacagatggagaaactaagacagagaacagctca

SEQ ID NO: 35997 - DNA, 120 bp, Homo sapiens
ggccgcactgtgagtggctgagccagaacctgaacgcagcactctaactcctactcacacttacctgctctgcctctaatttccttcctttttgtcaaactactggacccctaggtatag

SEQ ID NO: 35998 - DNA, 120 bp, Homo sapiens
cctcgtttaagcctaaaatcatcaaggtgtatggttcaacaggaggctacaattcctggagccagcttagattgaggtcactattcttaattctacttaatcctctctccataccataat

SEQ ID NO: 35999 - DNA, 120 bp, Homo sapiens
tggcggggggaggtggggtggacaatgggagagaaaaagagagcgagagagagagaagcatttggcttgaggccaagaagtgaatctgtgatctgagatgtgaatatcaaatgccttctt

SEQ ID NO: 36000 - DNA, 120 bp, Homo sapiens
caccgggtcacttttctgaaaggcagatgggtgtatggggagtggatgggtagatggtgcaggaaggcagcaggtacccactaaacaaacagggggtgggcgggttgcctgcacagagga

SEQ ID NO: 36001 - DNA, 120 bp, Homo sapiens
ctacgtcactctggtctcttcccctaatgagaattccagtctcacatgaatggatggattcattctgggggcaggaaaaccactcagggagtgaatcagaaggacccagccccggtctcc

SEQ ID NO: 36002 - DNA, 120 bp, Homo sapiens
aggcgccggtgctgttcccgtctttgagagacagggtcagggtccacgcaagagatgacgtagaagccctttaagggggaagagaaaggaatctcagctttgagggacaaagccaccctt

SEQ ID NO: 36003 - DNA, 120 bp, Homo sapiens
cttcggatcacccagagaatcatttacctttattagtttctgctgtgctcttctcccaacttgtgaaggaaagattggttcagtaaaggccaatctaggcaatataaagcatctgtactg

SEQ ID NO: 36004 - DNA, 120 bp, Homo sapiens
agacgcagcagccaaaaggatatctatattgcaagactggggggcccagaatgacactgaaaggacgtaattcctctgggaaagggaactgaagaattgccgctttgcccaccactaact

SEQ ID NO: 36005 - DNA, 120 bp, Homo sapiens
tgccggggcttattaggacattgcttcaggctttcctcccgtgcttgcggtgattgtctgacatttgtccatcaatcttggtctaagaaacaggtgggggaggggacagatggttcgcat

SEQ ID NO: 36006 - DNA, 120 bp, Homo sapiens
ttgcgttctccactgatggccaaaattaagcttcaaaagccttcctgaaggacattctgttatcttaattcattcataactggttatcatgcgctttgcataaacaaacacactagcctc

SEQ ID NO: 36007 - DNA, 120 bp, Homo sapiens
ctgcgctttggtgcgctccttaccccctccccctctcgagtcttcgagggggtatagagggagacgtgggggaaacaatgaggtgtttgggtcgggcgagggttggatgggctccgcctt

SEQ ID NO: 36008 - DNA, 120 bp, Homo sapiens
tggcgcggcccggcggcccctggatcaaggcgatccgaactgaacaaagcgggctagacgccacctttccgcccccacgccttggctaagtgggggaccgcgaggggaaggcgcctccag

SEQ ID NO: 36009 - DNA, 120 bp, Homo sapiens
gaccgctggccggcgtgaaaggttgggaaccgggggcatcgaaggggaagcaaggggccgcacgtccatggagaggccagggcgcggcccctacgcctccgtggctggctttcccgctgc

SEQ ID NO: 36010 - DNA, 120 bp, Homo sapiens
agccgggaggcactggaggggaaaagtggggatctgggggcccgatcctcaggcgcaggtggtgaccacgggggccagcgacacggggggcgccgaggatgcagagggtgcaccgccctt

SEQ ID NO: 36011 - DNA, 120 bp, Homo sapiens
ctccgccttcttctccttttgcttgaggtggatcttggcgtggcgcttgcgctcgtcgctgcgcgcaaacttgcgcccgcagaactcgcaggcaaagggcttctcgcccgtatgagtgcg

SEQ ID NO: 36012 - DNA, 120 bp, Homo sapiens
ggtcgctgcggctgaagctccgcatgcagatccggcactggaagggcttgtggcccgtgtggatgcgcaggtgccgggtcagctcgtccgaacggctgaaacggcggtcgcagccctcgg

SEQ ID NO: 36013 - DNA, 120 bp, Homo sapiens
ggccgggcacgcgtggggccgttcgtggagcggtgtcttgctaggccggttggggtacttgcggggccggatgggcttgagggtgagcggcggctggggcaggctgccaaagcccgggtg

SEQ ID NO: 36014 - DNA, 120 bp, Homo sapiens
gggcgggttgacccggatggggtccatgccctggaagggcttgtgctccggaatggagcccatgtcgttggggtggtggtagaggttgtagtcaggaatcatggggaagagattgctgtc

SEQ ID NO: 36015 - DNA, 120 bp, Homo sapiens
caacgccggcttggccgattggtaatcctggggggaataggcgagcccgggattgccctgggggtcgtggaaagacacgggctctgagtagaggtcgccgcagttggagtaggggggtag

SEQ ID NO: 36016 - DNA, 120 bp, Homo sapiens
tagcgcgggatacatggcctccacgtcaccctgcggtggctgcaccatgctggccgtggacgtctgcgtgctgagcgcccctgaagccgggggcacccccaagatgccggcgctcatgag

SEQ ID NO: 36017 - DNA, 120 bp, Homo sapiens
agtcgaaggcgaactttcccaagtaggtcacggtcttgttgccgggggctggctggaaggagccggagtaagagagttccgggttgggcttctcgttggtcagaccgatgtccattacat

SEQ ID NO: 36018 - DNA, 120 bp, Homo sapiens
ctgcggagagcgggggagagaggggaggggtgagtgaagccgatccggctccgggccgcggcgcccaggtccttgcccaggtgcggagggtgcggccgggtggagtgcgtagcgcatggg

SEQ ID NO: 36019 - DNA, 120 bp, Homo sapiens
gaacgctgagccccgcgcaaagcgggcggtgccgcgctcccgggcgcaacctggatatagcaaaatactacggatcggggtgtggagtggctgctgcacacacagcgcacaagccgcgca

SEQ ID NO: 36020 - DNA, 120 bp, Homo sapiens
tcacgtaccacacacacacgcgcgcgcgcgcgagaagcattgttgttcttcccgaggtggggcgggcaggtagctgcagctacaggtagtttcagacccggagcgcgctgggctctcgct

SEQ ID NO: 36021 - DNA, 120 bp, Homo sapiens
caccgcacacaactcggcctcttcccttggccctgtccgctccaggacgccgcgcctttccctccccggcgatgccccccacgcgcgctgctcccgggtcgccgacccagagcgctccga

SEQ ID NO: 36022 - DNA, 120 bp, Homo sapiens
cgacgctttgtcctcggagcgtagaagggtgtcgccctcaaagggagctctcccttcacctaccccggccccagcctcctcgggcatgaaggagctttaggctcttgctggaggggaaaa

SEQ ID NO: 36023 - DNA, 120 bp, Homo sapiens
gagcggcggaaaaccggccggtgtctccatggcgggagaggccgcccttccccagctccccggccccgggatcgttccccgtggcaggccctcgccccgcgggtgaaccccctccttctc

SEQ ID NO: 36024 - DNA, 120 bp, Homo sapiens
ccccgccgtccccacacccccacggctttgctgaacgccccggaaaggcagcgtcgcagtacctctcccaccgcggggactccacgccgcacatggctccatcccgggtgggaggctgag

SEQ ID NO: 36025 - DNA, 120 bp, Homo sapiens
gagcgcgggtgaaaaagacgccgggctcctcccgggaagagggcgacagcaccacgccttgcgcgtagcccggcgatcgggccccctgcgtggtgagggagaaccccagagccgctcgca

SEQ ID NO: 36026 - DNA, 120 bp, Homo sapiens
ctccggtcggcggctgcccccacccgggagaaccgaagcctctaccgtggcgtcgccaacctagccttctcgatcgaggagggcgggaggagtgggtgggaaaagcaactcgccccccgc

SEQ ID NO: 36027 - DNA, 120 bp, Homo sapiens
cctcgctgcctcgccgcctccccgccgcccttacctgtagccatctgattgtaatggactaccgagtcgctgctgccggagaagaggttgagcgcgctggggatctcctcggggtacaga

SEQ ID NO: 36028 - DNA, 120 bp, Homo sapiens
caccggcagcttctcggcgagtttgccggtcatagcactcccgagctgccgccgccgccgccaccgccgccaccgccgccgctcgctcctaacgcagcttccaggcaagcggcatccgag

SEQ ID NO: 36029 - DNA, 120 bp, Homo sapiens
aggcgatccgtggtgcaggggaaaagcatgcgagagggaaagttcggggggaggggggagggaagaagggaagggatgggccaggagaggggatcttctcttttttggggggcgggagag

SEQ ID NO: 36030 - DNA, 120 bp, Homo sapiens
gaacgagtgtgtgcacacacatgtgtatgtgtgggtgcacgtgtgtgtgcgcacgcgcacatgccagggtaatacgggcttatgggtgaattggtgtgtggcaggaacagggacgagggg

SEQ ID NO: 36031 - DNA, 120 bp, Homo sapiens
caccgtagggcaggaaggaacctgcacggcaggaagggaattgaaacccatcacgaggctggggcaagctgcggggaagaaatcccctgagtccagagcgagagctggctcccctcaata

SEQ ID NO: 36032 - DNA, 120 bp, Homo sapiens
gttcggaagcctctgagccttcagtgccctggggcactcgtggttcctttccagtcccaagtcgacagccctgtggttctcgggctccctggccagctcctgaaacccagtccccgtgcc

SEQ ID NO: 36033 - DNA, 120 bp, Homo sapiens
tgccggctagcctcttgctgcctcctttcctggcttggccgcaactccttacaccccctgtttcctgccacagagggcaagttctagaaggcagagggggtgagtcaggcccttggggtg

SEQ ID NO: 36034 - DNA, 120 bp, Homo sapiens
ctgcggcttctgtggtcaccgctcagaggaaagccccttcctgtatggcactgctgtccccgagaggcagagagtccgcggccaggcaggaaaagggcagcgctgctgtctgtgcttggg

SEQ ID NO: 36035 - DNA, 120 bp, Homo sapiens
ggacgagggtaggggcagtgtgggcacttcagaggccttggtggtgggaggccttggctgaagggagaaaggaggaggaagctgtctgatgcctgtctcatgagccacctgccctgtggc

SEQ ID NO: 36036 - DNA, 120 bp, Homo sapiens
aaccgtagggggtgctgttctcatcctgcatagccagatgcagcagtcctggcactctcacttactggtcagtgctgataggaaagatgttagtgatgagagatgttagatttcagcgat

SEQ ID NO: 36037 - DNA, 120 bp, Homo sapiens
aagcgctacccagcaatctgtgtattcggcaattaacaaagggtaagtgagcggaaggcactgacagctcccaggctctgaggtccccaggggccgcctaacgccagcctagagaagacc

SEQ ID NO: 36038 - DNA, 120 bp, Homo sapiens
gcccgtgggaagtggaagaaggaggcgcagatctgagccctcctgggagctgagtacttctagactccagggtgtaggatggccaattattttgtggaccagtttccctccagaaatgtc

SEQ ID NO: 36039 - DNA, 120 bp, Homo sapiens
ctccggctgccaaagttgggtgggcactattgaaaggaggctagattttggggccttgagggatgtgtaggagcttttcagttctccagtggataagacaagggaggggaagggcagctt

SEQ ID NO: 36040 - DNA, 120 bp, Homo sapiens
ccacgtatcaatgtgcggttgtgggagaatgatttgcttctaggagtaaggagtttacccaggatgggaggagcttcacccagagcgtcaccaccctccatgacactgggttaagagacg

SEQ ID NO: 36041 - DNA, 120 bp, Homo sapiens
gagcgacagccttgcgaggctagcgtgggatggtctggagacaaggtggcaagactcaggcaggagctgaacagctggcgcctccttctggcctcgcagggctggagcaggactggggag

SEQ ID NO: 36042 - DNA, 120 bp, Homo sapiens
gggcgggcttgtgcgagaacctctgcccctgggctcccaggatgtgaccctccctgccagagacccttaaccccggacagccccagctcaggagagctaacagtgagcgagggaggctgt

SEQ ID NO: 36043 - DNA, 120 bp, Homo sapiens
aaccgactgaactcctcgtcaacactggtgactaattccgacagtctcggccagttgtggctgattctcacaccctctgctggatgcatctctccgcttcctccctggccctggccccag

SEQ ID NO: 36044 - DNA, 120 bp, Homo sapiens
ccacgtggactggggatgcttggggaagcaagccttttctagatgcgtccagcccccaatctttgcatcccttcctgccttaaaaagatgccaggagcagattgtccatttctgtctgta

SEQ ID NO: 36045 - DNA, 120 bp, Homo sapiens
tttcggcttgccaaggctgggactgttgagttcggaaatcgtggtggccaaactccaccatttaccaggggaaagggacccagggagtacctgacctccctcagtctctggacctaggac

SEQ ID NO: 36046 - DNA, 120 bp, Homo sapiens
ggtcgcaggttccctggatgatgctggggaaaaggcctgtgttcattgcctcagttctaatttttctttttcaaaaggaagctctcagaacgcccagctatccccactgcagaaggctct

SEQ ID NO: 36047 - DNA, 120 bp, Homo sapiens
ggacgtttgcatttatctggagacagttcatggagaaacacaaagaggtgtcctgacaagacaacaggtccacagcagtcgtcatcatgagtgctcaccatatgccagggttcatctttt

SEQ ID NO: 36048 - DNA, 120 bp, Homo sapiens
ccacggtgactcggaggcccaagccagttctgacacactgccttcccatgacattcccacgacaggttcccgaggtcgttggaatgcttacacatttcagcaacttcatggcaactgccc

SEQ ID NO: 36049 - DNA, 120 bp, Homo sapiens
gctcgacccagaagataatactaccttgtactccccctgccgcttccttcctccaggcagctcacagacatgacctcattccctctcccagagtcccataggggtgaaggacagggtggg

SEQ ID NO: 36050 - DNA, 120 bp, Homo sapiens
gatcgttaactctgcttcctagggaggaaagggaggcccagagagggatgctggcccaccctgggtcatccagccagctagcgggagagctgcaactggaaatcaggcttccctgccctc

SEQ ID NO: 36051 - DNA, 120 bp, Homo sapiens
cctcggggacagttatttagcctcctggatgtgagctagaatcacccctaagatgcagcaattggggtactcctcttggggtactgggactcagtggctgaaacagctccaagagagttg

SEQ ID NO: 36052 - DNA, 120 bp, Homo sapiens
atccgagatgcatataaattcaatccgtatgagaagagcagggtggcctgggaggagtggtcaccgcagtggctccacctcctacccggccacctgcagccctgcctgggctgctcttgg

SEQ ID NO: 36053 - DNA, 120 bp, Homo sapiens
ggccggatgccctgggggccagagcagccgcaggtgcgatgaaaagaacactggccttgaggtcatgggacctggggaggatattcaccaggggcccctaagttagtcattttagctctc

SEQ ID NO: 36054 - DNA, 120 bp, Homo sapiens
tttcgcgcacaccagttgccctgtgcattagtcctctcttgcaccttgtgactctgtcatagtagcctgacttcccagaggaagcgagctctagggccagcggggaggcgggcatcagat

SEQ ID NO: 36055 - DNA, 120 bp, Homo sapiens
ccccggggaactgtggggtggggtgtgtgtgtgtgtgtttgtgtgtgtgtgaacccctctagccttattcacagtcccctctgggggccaggggcgccccttgatgccaaccggaaagcc

SEQ ID NO: 36056 - DNA, 120 bp, Homo sapiens
gcccggaagaggtccaaagcatgtgtggctcctgacatggcgaggggaggctggggggaggcggggaaggcggagagagcgagaagacccccctgcaagccgtgttcatacaaaatgcat

SEQ ID NO: 36057 - DNA, 120 bp, Homo sapiens
caacgtatccctctggcctgtcggagccccttctgctcactgctctgtttatacatgatagacaactaattaacatccaaacctcttgaaaggtcttttcagaggtaatgttctgacaga

SEQ ID NO: 36058 - DNA, 120 bp, Homo sapiens
tctcgctctctctctttctctctttttttttacagtaaaatcacagcacgctaaagaatacacatttatagcacaatgcttctcatctaattatatggcaatcattagttttaagctgga

SEQ ID NO: 36059 - DNA, 120 bp, Homo sapiens
tggcggtggccaggtgctcagtgagaggcctgaggctctgggtggaaccagattccaggattcagctaggatccaactagggtcattgttttcagcgagatctcacagcagcgaccctca

SEQ ID NO: 36060 - DNA, 120 bp, Homo sapiens
ccacgctggtctggccgacacatgctgttttcaagcacttcctgcccaccaggaggggaagagatcactggctttggagttatagcaggaggttgaaccccagagtggctctcattgacc

SEQ ID NO: 36061 - DNA, 120 bp, Homo sapiens
atacgtaggaggagcctggggacacctgactgcaggctgttgtggggattatggagacagcccctggcccacagcaggtgccccatctttgttggttttcttctgtccctgtcaccagca

SEQ ID NO: 36062 - DNA, 120 bp, Homo sapiens
ttgcgtagaacacacagcacactcggagtgggggatggggtcaggaatcaaaggcaagaacgagaaccagagaaggaaggaagggaagggacagagtgtggttatcttgcagttgctttt

SEQ ID NO: 36063 - DNA, 120 bp, Homo sapiens
tcccgacctcccgtcccgggagatgtgccaggcttgggtgctgcgagccgggagcctgatttagcgcacgccttgttaggagaagctaattaacaaacctgcatttaaataagcagccgc

SEQ ID NO: 36064 - DNA, 120 bp, Homo sapiens
gcccgggtgtttgtaaccaccgccttattgaattgtgacaagttattagcccttgcatgttaaatgaaacagaagcatccaggaaaaacccctaaatccaatctgcataaagcagattcc

SEQ ID NO: 36065 - DNA, 120 bp, Homo sapiens
tgacggcagcaaaaactgattcactcgccgctttggggagaactccaggcctcccttccttcgaggttacataaccctctgtcaacagcgacatcaggagaaaggcagcgagccggaggg

SEQ ID NO: 36066 - DNA, 120 bp, Homo sapiens
gaccgtcaggaacgctctgggatccatctgggcgtcaccttttgcgggtgctggggacactgcttgcgtgaaggaacagaaacgggccacgtgtgcacggtttgcgcatgtgagctgtgt

SEQ ID NO: 36067 - DNA, 120 bp, Homo sapiens
tgccgcccactctgtccccacttttcccaggcctagatgctgctcccgtggcagtgggacgacagggcagctcagcacagacccacgggggcccggcaacttctctctgcatttccgcaa

SEQ ID NO: 36068 - DNA, 120 bp, Homo sapiens
agccgttggccctcagctgtcttcaaccaaggatactagaaccggaatcgagagctgctgtgtcctcagttaaattcctgtcctcctggggccacctatgggaatctggcccaagtgccc

SEQ ID NO: 36069 - DNA, 120 bp, Homo sapiens
tgccgagtgcccaggacagaaccacggccatttcgagaccccagatgtcctccaatgtgtcctctcggagacgccctatctctggaatggggtaaggctctaaaaggcaaattgaggtcg

SEQ ID NO: 36070 - DNA, 120 bp, Homo sapiens
cggcggtctggcttgggacagatccgccatgtgctccctggccacagatcctgctcctgctccctgagggaggaggattgagacacaagcccagagagggaggcaggggtgatccagggt

SEQ ID NO: 36071 - DNA, 120 bp, Homo sapiens
cagcgaccactccaggtccccggagaggccacctcagtctggcatcgagaagcttgtcaatgactgtgaatagaggaggaaaagagcagaccgacaggcaaacgtggagctgcattttct

SEQ ID NO: 36072 - DNA, 120 bp, Homo sapiens
caacggggctactctaaagaatgcaggtttaaaatctcagctctgctccttactaccttctgtacccctggataggtggattcacttctttgaaccacagctttctcgaacgtcaagtag

SEQ ID NO: 36073 - DNA, 120 bp, Homo sapiens
tttcgcagtgttatagtgggaataaaataagacagtgcatgtttagaaagtgcccagcatggagtagaaactgaatacatcctggctgtctttcccttcctcctatccccttcatccggc

SEQ ID NO: 36074 - DNA, 120 bp, Homo sapiens
aaccgtttgttctggaggggctctggattagtggtactaaggaaagaacactctaatacattatgtattctggggcttgtgttccttggttgggacctctggtaataggctaggtatatt

SEQ ID NO: 36075 - DNA, 120 bp, Homo sapiens
tctcggcagaaacagctctgtgaggccacctatttgtattgtgatgatctgcttctaggctcacctcttcagctctttgaggacagggactgtgtgacctctgaacctaacccaggaccc

SEQ ID NO: 36076 - DNA, 120 bp, Homo sapiens
agacgaggggttctgtcccagctgggtcccatccgcatatcctaaccctatgcctcaatttcctccaggagaaagcttgggggaggggtgaggagaagcagtaggaatcgaagtgactcg

SEQ ID NO: 36077 - DNA, 120 bp, Homo sapiens
aagcggcttccattcattagcatttgtaaagggctctgagcgctgcagatggaagctgctccgccaggcagcttgttaggactaaaaatagagttgtgtagcaccttctcggcagagctc

SEQ ID NO: 36078 - DNA, 120 bp, Homo sapiens
gggcggaaggggtgagaaaataggtagccagaggtggaagtagctgaccaagtcctagcgggtagtacgcaccacagtaaaacaccacgggggccgctgggcaccgccgagcgccaggct

SEQ ID NO: 36079 - DNA, 120 bp, Homo sapiens
acccgcagcgcaccccatctgtgtgggaaggtcggggcaggggacccagggcgggatggcggtgctggaccccgatgaggccccttcacggccactagggggcaggagtgcggggcgggc

SEQ ID NO: 36080 - DNA, 120 bp, Homo sapiens
gcacgagggggcaggtgtgaccgtgagagagggaggcaggcggcgaggccaaggggtaggtcaccaggcggggacctgcagggccagacgccgagccctggatgcgaggtgggggtagac

SEQ ID NO: 36081 - DNA, 120 bp, Homo sapiens
gggcggcccggggaagaaccagtgctggacggggctagaggcccacgttctcctgtgactcaggtctgactcaatgccatttctgaaacagcctggggggcggcgggagggggagggaag

SEQ ID NO: 36082 - DNA, 120 bp, Homo sapiens
ttgcgaaaatgacaaaacaactccttgctcagggcagcccgggaagagcggcgggcggatgggaattaccccgggtccccctgcggcgtctcccgctgcccacccacgggcggtgacggt

SEQ ID NO: 36083 - DNA, 120 bp, Homo sapiens
tggcggtggcggtggcggcggcgggaccccgggcctggctgcgcgctccacctgcgcctccagggcgttgggcgggggccgcactttccccgccgcgaggtggagcgcgccaccgccccc

SEQ ID NO: 36084 - DNA, 120 bp, Homo sapiens
ccccggccgcgcagcgagaaggagcctcggggaagagctaaaaaaggcaaggcgctgctgccggtgccggtgccgcagccgccggggaaggaattccctccgcccgggcgcacgcggccc

SEQ ID NO: 36085 - DNA, 120 bp, Homo sapiens
ccccgcccccgccccatcctgctcagaaaagcctcggatgctgcccgggaggaggaggcaaaggaagactccgttccagccacctcccgccgcccggatcccagaggaaaggggagagga

SEQ ID NO: 36086 - DNA, 120 bp, Homo sapiens
caccggatctggtgggcggaagatgggccacgcgggaaggagatcggcggccactcccgggggcgcgagcggcggcgcctagagggacccccaccccgggctcgaactcccgacaagact

SEQ ID NO: 36087 - DNA, 120 bp, Homo sapiens
gagcgcagggcccaccccggctgtcccagctcgggcgccccaaacccacagctcccactcaggacacgcgcctcgaggtgtggcccggcgccgggcggtgctgcccggagagcgcgcagc

SEQ ID NO: 36088 - DNA, 120 bp, Homo sapiens
gcacgcggaagggagccctttggggagaattcccttgggactgtccctggcctgtgaaagcatccgactgaccctcactacataagggacaaaccccaagacaagtgaatggatggtgaa

SEQ ID NO: 36089 - DNA, 120 bp, Homo sapiens
agccgagagtcctgtcccgcagagtagcatatactcctctaaaagattgggttcctgcccggcctctgcacctcccatcccaggagttagaatcagcaggcttcctttctctgctcctct

SEQ ID NO: 36090 - DNA, 120 bp, Homo sapiens
tgacgctgtgtgcacatgggtgtgcatgcaagtgtgtgtgtgcacatgtgcacacatgtgcacgtgtgcactttattgctcgtcttcccaaaggaaagggtgtttgtcgtgtttgcaaac

SEQ ID NO: 36091 - DNA, 120 bp, Homo sapiens
ttgcgagccatatcacaatctatttgctctctgatagtgaaaaacacttcaaagagaagagtctattccccgcattggagtaacttgtgtgctgccgccctctggagcttgttgtcctac

SEQ ID NO: 36092 - DNA, 120 bp, Homo sapiens
aagcgatgagtgactgaacctgcattttcgttgcaatggtaacccataacatatctctcagtgtagggcccatgtggttagttcctcctttagaaatgaggaaattaatttcaatcagac

SEQ ID NO: 36093 - DNA, 120 bp, Homo sapiens
ctccgggaaagttcacttctgctctgttcagtcaggctcctattccagatgttcagagttgattatgcaatcctcacgatgttgaaaagcttcctgtaatatgatgatacatagaagaat

SEQ ID NO: 36094 - DNA, 120 bp, Homo sapiens
aatcgtatcctattgtcatgtaggaagagcttatataagtgaataatcgctatctaattgatccctttgtgtttgcttcaagctatatgccatcgatatgtgactgttaaagggtggttt

SEQ ID NO: 36095 - DNA, 120 bp, Homo sapiens
acacgtaattttaaatatcatttaatggaggaaatggtccacaaagtcaaaagtgcccagaccccaccaaagtcagcgcatggccttgctaaggtttcttgaatctggtatactgcttca

SEQ ID NO: 36096 - DNA, 120 bp, Homo sapiens
tcccggggacgttaggtgccaccacacaccctccttcttgctatgcctccagtctcacccacttccacaccactttctgccctgcaaccagagagatcttcctgagctgcttctgcactt

SEQ ID NO: 36097 - DNA, 120 bp, Homo sapiens
aggcgctcggagcaggctgcgaagatgtggagggttggaccctactcccagcgtttcagactcagtagatctgaagaggagcctgacaactggcttttctgacctgctcccctggctgct

SEQ ID NO: 36098 - DNA, 120 bp, Homo sapiens
tctcggcttcatccctcctcctgcctttctgaatctgccgtgcagccatcctgcgatgggtgcagtttcccgggaaggcatgctctccaccaggcccctgcgcctttgcacaggcatagc

SEQ ID NO: 36099 - DNA, 120 bp, Homo sapiens
tgccgggaacttctccagccttcactcccttcccctgacctggctggtgcttctcaaccttgctgcctgttctcagaagtctcctgttcaggaaagtcatgttggtcctccacctgcccc

SEQ ID NO: 36100 - DNA, 120 bp, Homo sapiens
ggccgcatttcaacattcttaactccctactgggcaaggattgttccccggggtgcttgtggatgtggcagggctccaggtctagtttcagctgagccattcctgcctctctgttctgtc

SEQ ID NO: 36101 - DNA, 120 bp, Homo sapiens
ccccgttgagctcttgctgtcatccctggggtccccctggtggcagcagacgtcatagcctggggcctttcctggcctgtccggacctgcccgggccctggttttcctcaccctgaagtg

SEQ ID NO: 36102 - DNA, 120 bp, Homo sapiens
ggccgtgtgtgttacagagcagtacacagtgaccgggctgatggaagcgacccagatgatggtggacatcgatggggacgtccttgtgttcctggaactggctcaggtatcatggcaggg

SEQ ID NO: 36103 - DNA, 120 bp, Homo sapiens
ctgcgaatgggaaggggtggaagatggtctatgcgggagaacctgtcatcggactgggctctttgactgcgcgtagcccatctcctcctccatgccaggaagcagctggggaactccctg

SEQ ID NO: 36104 - DNA, 120 bp, Homo sapiens
acccggaggggagctgaccaagtggggaagggatgaggctttaggcagcagtagggctggggagggaaccccaggctcaggcttacacatggttgctgcctgcctgaggtcatttaaggg

SEQ ID NO: 36105 - DNA, 120 bp, Homo sapiens
aaccgcctactcccttaatcccaaacaaacaagccaaatctcccacagtggccttcacagtgccagaaattcagccaccaaagattagtgtgtggagtggaagcacggctcaggcagggc

SEQ ID NO: 36106 - DNA, 120 bp, Homo sapiens
ctccgtgcaggctgccttgatcccagatgtggaggagagagaagtcaggtaggttgagatctgaggagggcagatgcagtatgaagccactacatagggctctggtgtctgcagcgagga

SEQ ID NO: 36107 - DNA, 120 bp, Homo sapiens
tggcggtggtgccaaggagcctgaggcagcatcatcatcctcagttttgtgtggccttgcctctggcgcaggctctctagaactgcagggcctctgcgtgccctgcaccagagcttcagc

SEQ ID NO: 36108 - DNA, 120 bp, Homo sapiens
agacgttcttcccttctgtccccagttccactgtgcgtaccagctggccgactggtgtctccaccacatctgcaccaactacaacaacgtgtgccgcaagttcccccgagacatgaaggc

SEQ ID NO: 36109 - DNA, 120 bp, Homo sapiens
catcggggccagtcctggcagtacctgctgccctccccttaggggtgcacagctcccatgtaatcccagggaccccgaggctgccagtaatccttgaccttggggctgggagcagcctgc

SEQ ID NO: 36110 - DNA, 120 bp, Homo sapiens
agccgttcctctggtctgctgctgtgtcctgctgtgtcctgactccgtattccccctcggaaccttagctctggccagaaacttccactctcatcccctaaccatgctgagtatctcctg

SEQ ID NO: 36111 - DNA, 120 bp, Homo sapiens
attcgcttaccccttctcccttatccttcgcctctgtttcattcccaacgcacaggaagcccttgtctagatcgcccgtctttggaaaggaacccagctggaaaggccttccccagtgct

SEQ ID NO: 36112 - DNA, 120 bp, Homo sapiens
cctcggaggctcatgtgccgtgggtcatggggatgtgctgggggctgggctggaggcctgctgcaggccttgtggtggggtagggctggtgtcccacgttcctcttgtccctctgcctcc

SEQ ID NO: 36113 - DNA, 120 bp, Homo sapiens
tttcgagaagcatcggtggccacctgtgtggtacctgaaggaggaagatcattaccagcgggcacggaaggagcgtgagaaggaggactacctccacctcaagcggcagcccaaacggcg

SEQ ID NO: 36114 - DNA, 120 bp, Homo sapiens
ccccgtcttcctcggcagcctcctcctcatccccatcttcctcctcggctgtggtctgagatgctgccaccctcttctgaccctgctgctgttgtccccatccgccttcacccctctgct

SEQ ID NO: 36115 - DNA, 120 bp, Homo sapiens
catcggtggcagggacagtagtggacatagaggaaagagtgcacacagacagaatcccagacagacaggaatccagtgtaatgggggaggggagtaaaaacaagagaggtactgctgaat

SEQ ID NO: 36116 - DNA, 120 bp, Homo sapiens
ggacgaggctgtgccgtccgtgggcctctctgattgagggagaatgggcgtgtggccagagatgcacagctgtgttgggccacagaaatgggctcatgggggtgtccatgggcatggtta

SEQ ID NO: 36117 - DNA, 120 bp, Homo sapiens
tcccggacatgagccattggcggggtttccctgtcttgtgactcacccacctgtgattcaggctccttgctttacaccaagtttgagcataaaacctgctaatatttctcgtcaaaaatt

SEQ ID NO: 36118 - DNA, 120 bp, Homo sapiens
acccgagtaacctcttctttcctctctgagtcacccacatccttaaaactgcccaggataatcacagttcctgcataggttgttgtgtgaactgaaagtgttaatatgtatggaaagtgc

SEQ ID NO: 36119 - DNA, 120 bp, Homo sapiens
gtacgatcattaccctcaatgttgattttaagcaaaccatattatcctggccaaactaccatgacctggagccttgggactgcacagcctccctctgtcagtcaaatatggagggatgac

SEQ ID NO: 36120 - DNA, 120 bp, Homo sapiens
ccccgccgccaagcacatgcagtgagactagctgtggcctcagctcactgcgtaaggacagcctccagctacagcaggggcagaggaccctgtagagctctgtagtctctgttgagaacc

SEQ ID NO: 36121 - DNA, 120 bp, Homo sapiens
ccccggggttctctggctgcacctggggctactgagtgctgcagtccagctctgatggagctgtcagggaagaggcagtgggtccctgagtggtgaactggccctggtttctggggaagt

SEQ ID NO: 36122 - DNA, 120 bp, Homo sapiens
gggcggaccttcactttttctccgtcaacccttcctgcatcctcatcagtgggcccaggttgctcagacctggaagcacctgggagacccatttcccgctccccttgccctggaggaccc

SEQ ID NO: 36123 - DNA, 120 bp, Homo sapiens
gcccgcgaagggagggaagttccagaatcgagagagggagggagtcaaggtggaacccatagagtgagcctcctgaagacacagagcggttgcctctctcattaattaattaattagtta

SEQ ID NO: 36124 - DNA, 120 bp, Homo sapiens
aagcgctcagagggacaaaatcagagggggcaaagttctaggatctctgctggcaggaaaagtgtggaattctggcctgcctatcctggcatagaatcctcaccactcagatccaattag

SEQ ID NO: 36125 - DNA, 120 bp, Homo sapiens
agacgcaggcagggaaatcaaagtgccaagggctggcaaaacatcatctgcaggggagaaggctgggcccagctgggctgcatagagcggcaccagccctaattaagttattagacacac

SEQ ID NO: 36126 - DNA, 120 bp, Homo sapiens
aagcggatattccctgagagtagtaacagagataacgtacgtgcacacaatccttaacagtctatatgacacaccattagctcatttcttttatttatgtattcagccaatatgtattga

SEQ ID NO: 36127 - DNA, 120 bp, Homo sapiens
cctcggagatagcccactggagtggcaagggaggtgaggcatctgttaaccaactcccaacaatcagcagttaaggactgtgcttgaaggtccagtgattcccggcactgcagccttccc

SEQ ID NO: 36128 - DNA, 120 bp, Homo sapiens
taccgagctgccaaagaacctctagccaaagagtcacatgtgctggcaactgaaagtcaagccagcattcatggagagggtcagtgttgagggcatgtgggctggacaccaagagtgtct

SEQ ID NO: 36129 - DNA, 120 bp, Homo sapiens
atccggcctaaatctgccaaccagcaatcaacaaactcaccaaccaattaagaaataattacagctactagctgtgctgatattctaatatgttaaagatacagaaagaacattcaagtg

SEQ ID NO: 36130 - DNA, 120 bp, Homo sapiens
tcacgcacactcccagtgaaaatattgattctacttgacttaaaattcagcacaaaggaggtgagcagagaaaaaggtaaataaataccatcaccacatctgcctaaccccttccccctc

SEQ ID NO: 36131 - DNA, 120 bp, Homo sapiens
aggcggaagccaagatggagaaggtggcaggcagtaatggagacagaatttctgttaactgctgtaattaatgttatgtctcatcagggagagattaggaaaaaacagagaaggaaggaa

SEQ ID NO: 36132 - DNA, 120 bp, Homo sapiens
agacgcccttgagctgggaacattagcagccgaagtttgaattgggtaattgtttgactgtatcggtggatttgcagacaggattaccacagtgaagtgaaatgtagttgcgctgaacct

SEQ ID NO: 36133 - DNA, 120 bp, Homo sapiens
cagcgtgagtggctccctcagcatggagcaaggggccttctgctgggtgcagtttatagcctgacacaggcacactgccctgagatttagatgggaaggccagctctgtcatcaacctgc

SEQ ID NO: 36134 - DNA, 120 bp, Homo sapiens
ccacgtctccctacacagctcctgctatacccagccatctggtgactacctcgctagccaaatccccgttgagagcgcctaaagctgccagcccagggcgctagggggaaaaggaggagg

SEQ ID NO: 36135 - DNA, 120 bp, Homo sapiens
ccccgcatgcatccaaaaggctcagcgctgccaaggaggccagccccgtgctctccaaggggcagagggtcccaagctgccaggctcagggaccgtgcatcagaggagggggaagtctcc

SEQ ID NO: 36136 - DNA, 120 bp, Homo sapiens
cctcgctcaggtcctcactcagcttgtcccaggctcacaggcacccatcctgtttgaaagccaaagttaaaaatggcaaagattgtcagttccaggaatcccggggcacctatacagatg

SEQ ID NO: 36137 - DNA, 120 bp, Homo sapiens
cctcgaagacttgaaatgctctgtggtcctcactgccaagtcaggccatacccaaggaccgtctcatcccttcacttgaatggccgtttggggggcgggaggatttccacccctcatctc

SEQ ID NO: 36138 - DNA, 120 bp, Homo sapiens
ccccggagtagagagatctaaaggatgaagggagaaggtcaggaatggaagtggtagtgaagggataccttctgtgtctctagaaagacccttccccacggggaggtggcaagagccagc

SEQ ID NO: 36139 - DNA, 120 bp, Homo sapiens
gtccggcggcgctctaaggaacaccacctccaccctccttccctttctcggacatgggcagccccacaggtgcacgtgggaagagctactggtttgtgtgtgtctgtgtgtgtgtgcttg

SEQ ID NO: 36140 - DNA, 120 bp, Homo sapiens
gtgcgtcgcaccccagaagcgccgccgcggggagtccccgaggaacctgcaggacgctccgctgcctctcctcccggaacgctcggcacgctcaggttacagcctgcgagggtgggtaca

SEQ ID NO: 36141 - DNA, 120 bp, Homo sapiens
gctcgacccccgaggttcaagctcagagcgggagaaccactggcactcgctcaaatccccagaggtggtagcatgaaaggatggggagtgggtcacaaaaatacttttaacaatatcagg

SEQ ID NO: 36142 - DNA, 120 bp, Homo sapiens
gagcgtagtccgctgattattctgtgggtcttttcaggcgagcaaggagttaacctcggaagttcagggatcgtaaaggttctcacctggaaggcccctcacctgcggtgcccgaggcgg

SEQ ID NO: 36143 - DNA, 120 bp, Homo sapiens
tcccgccgaggaaaagacccggggaagaagagctccgggtctgggcgagcccctggcgcctcacgggcgctgttgttggccagactccgacaaccaataaggccccgcgcccccaagagg

SEQ ID NO: 36144 - DNA, 120 bp, Homo sapiens
gagcgagcaagcagcgagcgcgggagagctaaggggaacaacatttttgtaaacgctctccgagataattaagctatcaattacccgggtgggaaatcagctgcgcttcccacagctcca

SEQ ID NO: 36145 - DNA, 120 bp, Homo sapiens
ggccgactcctccgggattcgcgcagggaaccagcaggcagcaagctgctggcgaacttttctgattaacttttccgttggagccccccacccacacccatctcctctcctctccttttt

SEQ ID NO: 36146 - DNA, 120 bp, Homo sapiens
aaccggctctctgcctggaggtgggtagaaagggaaggcggtaacgggggtagagggaggctctaaacgtggagacctcggagtcggaatcccagttctcagcaaccactcaagtctctc

SEQ ID NO: 36147 - DNA, 120 bp, Homo sapiens
aagcgacttggccaaggtcactcagcccatgcggaagccacgcttttgcgggttgagcgattccacacggaactactccattcctactctcatgaaaatccatctggaagggcagaaccc

SEQ ID NO: 36148 - DNA, 120 bp, Homo sapiens
acccgcaactccgaggcgagagcgagggggcggtgacggcgggtggccagtgacggtacccggagaagtgggaggctcgacctgaaactggcttaggatctgggatgctccggcccctag

SEQ ID NO: 36149 - DNA, 120 bp, Homo sapiens
ctccggcttccgggatggatcaagcagagctccaggtcgggactgagaggcagaggggcaggttcccactgcgggagggttggcacgcccccaggctcccgccgcgcgctctccaggacc

SEQ ID NO: 36150 - DNA, 120 bp, Homo sapiens
gctcgtttccaaccacctgtgcgacctctgggcccctcctctaccctctgccaaccccactcggggcagccccgggcagggatccccagggcgcccccacccgtccggcatgacgcaggg

SEQ ID NO: 36151 - DNA, 120 bp, Homo sapiens
gctcggggttccttgggatctagcgcgtgccggcgcccagccttacccagggtgaagaagggcagctcggtgttgtccaggtcgtcctgcaccgcgatgcgccccggcagctcgttacgc

SEQ ID NO: 36152 - DNA, 120 bp, Homo sapiens
ttacgagattttctgggtcacacagtgagcaagttgcagatcgggattaaagtcccagacagttgaacttctgagtacgcttcccttggcaccatgttataccatctgtgctgggctgaa

SEQ ID NO: 36153 - DNA, 120 bp, Homo sapiens
attcgtgtataccctgaacattagaatgtgatcttacttggtattacttggtatagggtgttgtagaaataatcaaataaagatgaggtcatactgcatcagggtagaccctaaattcaa

SEQ ID NO: 36154 - DNA, 120 bp, Homo sapiens
tgccggaaggaaaataggtaatttaggataagcgatgtataacctctaatccagtgtaaaagtaccaaacagattacaatggtgaatgctcataagattgtccccatttgtgtgacattc

SEQ ID NO: 36155 - DNA, 120 bp, Homo sapiens
caccgagaatgagcgttaatacagtgctttccatttttctggtgttttgagtagcgtggcttttggagaaagccaaaactcaaattcactccttatcaactgtgtgccttgggctccatt

SEQ ID NO: 36156 - DNA, 120 bp, Homo sapiens
atacggggacactgtccttatgggtgagtactcccctaagactttattaagagggcactaggagaagcactgggaggtcttctcagtaacaacactaaagtaattgctatttttccagcc

SEQ ID NO: 36157 - DNA, 120 bp, Homo sapiens
tcacgggattgtcagaccccagtcttcttctggactctataaactttttagaaatcatcagcaggctcctggagaagcttaaatgaactcacacaatatgtgacagtgaactccctggga

SEQ ID NO: 36158 - DNA, 120 bp, Homo sapiens
atacgaaagtatttccaatttacaaatgaggagtctgagtctgggagtcattctgtcatgtgtccactgtcacctgctcattggtggcagcactgagattaggatctaagtccacttcac

SEQ ID NO: 36159 - DNA, 120 bp, Homo sapiens
caccgaacttttcaactcaaagtaaaatctgtggagtaaatggtcgatcaaaaggaaccaactatattgagcaccatgcgtgatcatctgatcgttactgctaccttgtgagttaaaggc

SEQ ID NO: 36160 - DNA, 120 bp, Homo sapiens
ggacgagtaacttgccttaggtcacacagcttatattaatcacaataacatttgccgcaccttctgtattttttttaagttgctaagcttttggtgcatgtctggcaccgttttagttgt

SEQ ID NO: 36161 - DNA, 120 bp, Homo sapiens
taacgttatttttacgctgtcttctgtgaaagttttgagaatgaaatgagacagagcctccaataaaatttagggaagtgctacataaatgcaaggagttattatgataacagattgaaa

SEQ ID NO: 36162 - DNA, 120 bp, Homo sapiens
attcgaccccttgtgcctcttaccatatgtgaatgcttgtcagttgagagtaaactttcttcataaatttcacagttgtggattgataaaaacagagaactctggttcctcattccttcc

SEQ ID NO: 36163 - DNA, 120 bp, Homo sapiens
agccgctcccttcctgagctgtggcatctgtctctaaatcatgcttcctccttgcctgctgcaggcccttgtctctgccctttactttttctggctcttgccacggttttgaataaaact

SEQ ID NO: 36164 - DNA, 120 bp, Homo sapiens
aaccgcttctgcatgtgaccattaatgtgcctgtctttcttctcatgtattagagagaacaaaagctttgggaatcagacagatctgtgttctgatcctgtcttatggtatctgtcttgt

SEQ ID NO: 36165 - DNA, 120 bp, Homo sapiens
tctcggcttaaaatggggataatatctacctctcagttttgttggcagttcagtacacggaaataaagttctcactttcttttttctccttgagagtgttctttattttactcatctggc

SEQ ID NO: 36166 - DNA, 120 bp, Homo sapiens
gcccgacagaagcctaggtaatgtctcagcattaagcccactggtttgtggtgccttgcatttaggaggcccaagtccttatcctggtgttgatacaaacttcctgtgtgacactgggaa

SEQ ID NO: 36167 - DNA, 120 bp, Homo sapiens
cttcggcttcaaaaactttcccagaattggagtgaccctaccctccctttcaagaaacagacaaacatcctagaatgttacaacataagggttgaagaagctgttgttaagtgatcatct

SEQ ID NO: 36168 - DNA, 120 bp, Homo sapiens
ttacgcatgcaatgcccacttgaatgctcctacgctgggggactctctatctcacatgacagccttttcttatgttgaacagctttaaagctctgcctatgttttcttatgaaacacaaa

SEQ ID NO: 36169 - DNA, 120 bp, Homo sapiens
tagcgcaggccgttctcatcagcgccacggaggacggagacgccggggttcccggctttgagcctctggagcgcccgcgccttcgcgggctgcgcggggctcagggagccgcggccacgg

SEQ ID NO: 36170 - DNA, 120 bp, Homo sapiens
tcccgcgcgctcgctcgcccgcaggatctgggcagccccgcggggacccggctctgcgcgcagcccattgtacagctggcgcagccgcgcaaatgacatctgagcctcctttcaagccgc

SEQ ID NO: 36171 - DNA, 120 bp, Homo sapiens
cttcgagccaaagtggcctggatacataacctgcttcaacacacaccagctgtacagcttaagccttcagtgtttgctgcagtgatatcacctgtaccacagcttcttctgcagtgtgac

SEQ ID NO: 36172 - DNA, 120 bp, Homo sapiens
aggcggctctctgaagcctctttaataagggttttaccctcatgacctcatcgcctcccaaaatgccatcatcttgcgggttaggatttcaacatgtggattttgaaaggacacaaacat

SEQ ID NO: 36173 - DNA, 120 bp, Homo sapiens
tggcgttttcttccctgagggaagcaaacagatcttctcatgtctgcttcacccaacctattcaggccttgccagcttctgctttttttttttttttttttaattgcccagctgtttgta

SEQ ID NO: 36174 - DNA, 120 bp, Homo sapiens
catcggaaattaatttgaataaaatttaaactcagttttttagttgtgctagccaattttcacgggtctagtagctacatgtggccggtggtcatcatgtaagttagagcagatacagaa

SEQ ID NO: 36175 - DNA, 120 bp, Homo sapiens
tcacggaaagtggaaagttctataggacagtgccactctagatacatccggcaaatgtgagttccaatgtcaagtagctttgggaggtgctgcattcaacatattcctgtgatattagtg

SEQ ID NO: 36176 - DNA, 120 bp, Homo sapiens
ttgcgcagctatatcaaatatgatcgggaacaacgcatcaaagcagaaagcgttagaatgcaaggcagttggaggagagagaatcaacacatttgtttctgctttcaacattttctggca

SEQ ID NO: 36177 - DNA, 120 bp, Homo sapiens
atacgtttttatgtgactgtaaaatggaaacaataacaacagcaataataatgttaataacaatgcttacttatgccatagagttttcatggatgttaaaaagtaaatgcatggttaaaa

SEQ ID NO: 36178 - DNA, 120 bp, Homo sapiens
caccgtgcctggccatatttgtattagtgatagctacctctattgagcacttactatgtgcagtaaattttatgtttatgatttactttttcacattgagttcttaaatagataaaatta

SEQ ID NO: 36179 - DNA, 120 bp, Homo sapiens
gacgctccaatcatccccgcacacgctggggaagacgcgtggctgtgggagccgagtggcacagggagggctccagactggggagccggtgtcgccacacaggcaggggactggagcccg

SEQ ID NO: 36180 - DNA, 120 bp, Homo sapiens
gacgactgcagggaggcccagtcacgctaccgccgcttcggcagcggagcctagcctgccccccatctcttgggatgtcgagccggcactcaccatttctctgcttccaggaaatcctgg

SEQ ID NO: 36181 - DNA, 120 bp, Homo sapiens
cccgtccccagtccgtgagtgacagaagatgtgaccaaacactggactcaatgaggacggagtgacaacctaggctgcagcctttcctggcaggcctttatccctgctctgagcagggcc

SEQ ID NO: 36182 - DNA, 120 bp, Homo sapiens
tccgcagccgccggcagctcgaagccgtgcccatttcctctgactttcccgatctctgtcctaaagttctagttaagaggagaagcttctcgggatggatttcggttgcccaagacgcct

SEQ ID NO: 36183 - DNA, 120 bp, Homo sapiens
tgcggagaaccggggctgtctgtcttctcgctttgggggccgggcgccctgcccctcgcccagaaaagcctggaaatggtgtgggctattgttgggagaacccgcctcgcaacagagctg

SEQ ID NO: 36184 - DNA, 120 bp, Homo sapiens
aacgcagtcagggcgaggctgcggggtgggtggctgagcctcctggtggactatctcccctcccaccccccgccctggcccgcagctgttggctcttcctgggaagccacagcctttgtt

SEQ ID NO: 36185 - DNA, 120 bp, Homo sapiens
tccgtgttttattcctttcacttaaaccatggattctggtttaaatgcaaatacccctgagagaggcaacactatagaatgtggtcagttatctaccccttaataagaatacatttctgc

SEQ ID NO: 36186 - DNA, 120 bp, Homo sapiens
atcggcctgtctgaggctcttcttcctctgatggggaagtccaggccacccagccaggaagtgcctgccagaacccagcagaagccctcctgcccccatgcccacagggctctttctctg

SEQ ID NO: 36187 - DNA, 120 bp, Homo sapiens
gccggtagaccttatcttctccagcgctccggcagtcccctccttaggacccacctccctcagatggggttaaagagtcctggttagaatgaggggagtctaccttatggccaaggaggg

SEQ ID NO: 36188 - DNA, 120 bp, Homo sapiens
cccgggtctcattccccagggacagtgggaaaacgcacaccagggagtgctacccactggtccagacagctggaggggaaggcctgaggaggggggcttggcaggccaggccggcaggca

SEQ ID NO: 36189 - DNA, 120 bp, Homo sapiens
cccgtgcacacaggaacactgccttatgcacgggagtcccagaagaaggggtgatttctttccccaccttagttacaccatcaagacccagccagggcatcccccctcctggcctgaggg

SEQ ID NO: 36190 - DNA, 120 bp, Homo sapiens
gccggaggcctaggcagaaggaagctggcctgagccaatcacacgatgacctctccaacgcaacggccacgcccagtgtccgaaagaaggccggcagcttttctcgccgccttatcaagc

SEQ ID NO: 36191 - DNA, 120 bp, Homo sapiens
ctcggagccacagcactaagtgaatcagaccaaaggggtgactctggaaggcaccagcatgcattcagcagtggaacagggagcaatggcttagcatacctggaagctctggctcctcac

SEQ ID NO: 36192 - DNA, 120 bp, Homo sapiens
cgcgcccggcctgggtgatggttttaatgcacggctcttacctgagaacttagggtgctaagctttaattacacttttccatggttgcaacaagctgcgttttctaaagctctcttcctg

SEQ ID NO: 36193 - DNA, 120 bp, Homo sapiens
ttcggaggggaagcagaaggtcacgctggggcgctgaaatcccatctcagaatcctccagcacttggctaaatctccacactgaagagagctggccgcttcctactgctgctagggccag

SEQ ID NO: 36194 - DNA, 120 bp, Homo sapiens
gacggtgggacggagaagcacagacgcgccattctctgaaagtccgagcaggctgaggaagaacaaagccgtggagaggctggcgacttgcgggccagggctcagccacgcatatctgag

SEQ ID NO: 36195 - DNA, 120 bp, Homo sapiens
gtcgggccctcgcccagcaggatgcgggcgacctcgtgcatagcccctcgtgtgcccaggggccccggcgggtgctcgcctgcttccagcacgtgggctgccgcctgcagggcttcttcc

SEQ ID NO: 36196 - DNA, 120 bp, Homo sapiens
cacgctgccccactttgccctgtctcttccctgggtgagactggtgctcctggtgcagactgaggagactgtggctacccccaggcagggagtttgcatgctttggtacccaatacaccc

SEQ ID NO: 36197 - DNA, 120 bp, Homo sapiens
tacgtgcgaagtcatgaatctaaagaggataaacaggttaggtttgttatcccagaagctagaggcaagatttttactcagttctttcaacattaccacaagcatgtggattctgcaaaa

SEQ ID NO: 36198 - DNA, 120 bp, Homo sapiens
cccggggcctaccctcaggcagcgctcgctcgaggccagcttccgagctccaacccctgcccgaaacctcggcctcactgaaccaggtcctcagtggtgggcccacactcactcgctccg

SEQ ID NO: 36199 - DNA, 120 bp, Homo sapiens
accgcagggtagaaaatgatgtgggttccactcagcgagaggacctaccatatcgaaaacacgtttaggttctctgagtatgcatgcgaagccgccatgtacactgcgtttcttgctcca

SEQ ID NO: 36200 - DNA, 120 bp, Homo sapiens
aacgcctagctctttcaggcagggagtcttttgccaaagcaaacaatcccagctctacgattgtgctctggctggggtaggagagaacaaagatccctttctttgcttccccaaccctat

SEQ ID NO: 36201 - DNA, 120 bp, Homo sapiens
cccggaacagaaacggcaggagttggcatcagaatgcagcaacttgattcctggctacttaccagttccgtgacctgaggcaagttacttaacctctctgtgtctttattttattatcta

SEQ ID NO: 36202 - DNA, 120 bp, Homo sapiens
gccgcttgcctcacttcttcccgcttgccttatctccccgcagacgtggttcccctgcagcccgaggtgagcagctaccggcgcgggcgcaagaaacgcgtgccctacactaaggtgcag

SEQ ID NO: 36203 - DNA, 120 bp, Homo sapiens
cccgagtgggccgtgcgaggaaggctgtcgacctctactcctccttgcgctcaccttgccagaaagtctggtggcagcgcagagcccaatcattccaaccaaagcagggttggggaatcc

SEQ ID NO: 36204 - DNA, 120 bp, Homo sapiens
gccggttctggggtgcagttgtctcctccgcagtgagaattaggcccctctcagcccagtcaagccctgttaggggtccaaagcttcccactgcaaagactccaggaggcccccagaagc

SEQ ID NO: 36205 - DNA, 120 bp, Homo sapiens
accgagctttttactctcccaccagcacacagcttctgtacaggcagaggcaaaggcaaacacatacacacagctgagcccagcacagcactgggcccaccccactctccctagtgcact

SEQ ID NO: 36206 - DNA, 120 bp, Homo sapiens
cccggtgtggggcagtggctgacccgagccgggtgctgccccggcacccgctcaggtttttccagcgttctctgggcgttcatgtggcgagctaggacccggattattctctctgtactc

SEQ ID NO: 36207 - DNA, 120 bp, Homo sapiens
cgcgggcttggaggaccctgaggaaagcatgggatgcagaacaggcccacccggcccggcccactgttcaatcccagcccagcctgcaggtcaggattggaatcattttttattcgctat

SEQ ID NO: 36208 - DNA, 120 bp, Homo sapiens
tccgagtcccaccccaaagtcctgcaggcggcggcggaatagtcggtgcggggccagcatcagggtaagaggagggaggactttagggtgcgcgccgcgggcaagccgtcgtgggagcct

SEQ ID NO: 36209 - DNA, 120 bp, Homo sapiens
gacggagaaacagtgaaaagttcggactctctgtctcactccttgccccacacacacttgtccctgcccccacccttctgagtccttcctggattttaaggtctgagacctggcctccgt

SEQ ID NO: 36210 - DNA, 120 bp, Homo sapiens
cccgcagtcttttgagaagaggtcaccacaggaagagactgagttgaaagagataaggcagcaggtggactaacaggccccttcaggctgaggcttcctgggttttgtggagaaatcaga

SEQ ID NO: 36211 - DNA, 120 bp, Homo sapiens
tccggcccacagcccacgctaaccctggtggtcccagttagagaagtgggaggccaggtcccttatggaagggtgagagggagtgtcccagcctctctttagggcggggagaagggacac

SEQ ID NO: 36212 - DNA, 120 bp, Homo sapiens
gccggagcagctctgacctggagctgaggcagccagcagatctcagcagcccagtccaaataaactccctgtcagcagcaagcctgagtctggctctttcttgtccaagtgaaggttccc

SEQ ID NO: 36213 - DNA, 120 bp, Homo sapiens
gccgcttaacagtggcagtgacagtttgactcctgatttaagcctgattctgcttaactttttcccttgactttggcattttcactttgacatgttccctgagagcctggggggtgggga

SEQ ID NO: 36214 - DNA, 120 bp, Homo sapiens
ttcgcatgcgtgaagtattatctgggcctggagtgtgcaaggcacacatgtgtccttactgcatgtgttgtcacatatgtgcaatgccatgctcctgagcctttgattgcagacgtgtgg

SEQ ID NO: 36215 - DNA, 120 bp, Homo sapiens
cccggctgcaatctgcagtgctggcggttcccgttgaatgagtgaaattggtgtgagggtgagataggcggtcgttgaacagagagcacacatcagacctcacgacaatgagcttcttgg

SEQ ID NO: 36216 - DNA, 120 bp, Homo sapiens
accggagcggaggcacaccaaagccaaaggacacgcagctggcctcaaagcagaagctgcatcggggctgggaagccattcaggagcccttttctctcccctcgccctcaccctgagccc

SEQ ID NO: 36217 - DNA, 120 bp, Homo sapiens
cccgcaactggagggcctctacctcgagggagtggggtgtagatttttcctggaggtgaaggttctcagccctaccctctagcccgcccacccagctccagccgtctgtttctgtctcag

SEQ ID NO: 36218 - DNA, 120 bp, Homo sapiens
tacgctatctaccatgggaccagggggctacagccctactctgcaggggtctctcagcttgagccaacctggctggcggtcctcccaggttccattgcaggaggaggtggtgaggcgctc

SEQ ID NO: 36219 - DNA, 120 bp, Homo sapiens
ggcgcggcacagcggctgtccgtgtgtccccagacaggcaaggcaggacaggggtcctggaaaggctgcagggaggggtcctggaaagacaaaatccagctcctctgcagctcaggcctg

SEQ ID NO: 36220 - DNA, 120 bp, Homo sapiens
cccggaacttccaaccccaggtcatttggagagaaagaggagagagcaggatgggcggtggggcggggagggagacccacagcctcagccggcggggagctgaatcccggccaggatgcg

SEQ ID NO: 36221 - DNA, 120 bp, Homo sapiens
ggcgtgctctgcccgttccagggggcctaactcgatggacgtctgtctcccatctccctgctgggtgcttggctctgcccgccgcctctaccctgtctcccaggtcaaagtgccaggctc

SEQ ID NO: 36222 - DNA, 120 bp, Homo sapiens
tgcggaggagaccctgacgctaaggaagcaatgagggccagtccccaggccaggctgctgctgggtacccatggctgcgtgtgagcgaggcaggaccccacctcctccccgtctgcagtc

SEQ ID NO: 36223 - DNA, 120 bp, Homo sapiens
cccgcctcccttagaaagccccagagggagggaacagcaggcccggaatagggggaaatagaaggaggaagatgggaggcgtggggcttgttcttctttggctgtcgtaagcataccaac

SEQ ID NO: 36224 - DNA, 120 bp, Homo sapiens
ctcggcttatgggaggccgccctggagggcccggaggtcccaaggtccctgggaggactgggcccctcatgcctcgagcttggcaaccgaaaacccgagggaggagaagggacctgcctt

SEQ ID NO: 36225 - DNA, 120 bp, Homo sapiens
agcgagtggcccgacccggacaaaatgcctcttcctcgaggaggcggcgacgagcccagcaacagctcgagcacggccggccgggccgcgggaagcccgagaacgcggcgcgcgcagctg

SEQ ID NO: 36226 - DNA, 120 bp, Homo sapiens
ggcgctcacccgacgccggatccgaggtctcagacgttcgcactttatacacgcgcctcttcctctttttctgcagagacacgggggagcctgagggccccacatcgccaaaagaagcag

SEQ ID NO: 36227 - DNA, 120 bp, Homo sapiens
cccgcattcctgctggggtgggggtgggtggctgcctgcagggccctgacagatctgggggaggagcccagccagcggccccgcccaacctctgccctggctgctgctctggagaggggt

SEQ ID NO: 36228 - DNA, 120 bp, Homo sapiens
ggcgggggaccctgggactggtgatttagtgggaagaggcagccttcacacagaatccgcaggcctctggtgtggttggtttcagttccctttatgttcacagacccccacccccacaca

SEQ ID NO: 36229 - DNA, 120 bp, Homo sapiens
ctcgttgactttcccggcacattccatgcagctccaccctctgtgagccatgaagctgctcccagctgccctctctgcggtgggctctccactctccactgtgccatgtgccagaggcta

SEQ ID NO: 36230 - DNA, 120 bp, Homo sapiens
cacgcagaaatacactggatgttctctctttgcttcaatggagacccaaggagctgggaggtctcttaagagactctctgattctccgtggctgggtgtgatggctcatgcccataatcc

SEQ ID NO: 36231 - DNA, 120 bp, Homo sapiens
tgcgcacacacgcgcgtgcacacacacaccccacacatttattttttaatctaggggctcaaaagatgacacgcgccagagctggaaggcgtcgccaattggtccacttttccctcctcc

SEQ ID NO: 36232 - DNA, 120 bp, Homo sapiens
cacgatccatgttcatctcacatctcaaggtctctcctgtacagcgtggaattgctcttgtctgggatttatattcccttctgtgtaacttaaaaactccaggccccatatcttcaaaac

SEQ ID NO: 36233 - DNA, 120 bp, Homo sapiens
tccgggttctcccacggtttcccgcatctgggcctggccagcgcctttgggaggaagggcctaggcgcggtagggatgcctgggagtctagggagtggcgggggtgtttcttggcccggc

SEQ ID NO: 36234 - DNA, 120 bp, Homo sapiens
aacgccctggctgaaagctcttcctgggtttgggacatcagaagaccttcccgggatgggctcttgtctctgcagtagctatgacctgcacataaacctgtttcctacactgtaaaattg

SEQ ID NO: 36235 - DNA, 120 bp, Homo sapiens
gtcggggctgttcaggcttctgctgtattaacacttgtcttcagaaagaaagcagtggagtttggtgcagtgagcacaagcagcctactagtcctgcctccaagttggcaagtctgtttc

SEQ ID NO: 36236 - DNA, 120 bp, Homo sapiens
ttcggccagctcctcctcccctccccgcccccgccccctttctcagctactgccatcctgaagcgtgccaggtccgcccccttcagaagttttcttggacaatttttttttttcaccgcc

SEQ ID NO: 36237 - DNA, 120 bp, Homo sapiens
tgcggctgtgacagcagcaaagaatgacggccaagggcgacagcaggggctggccatgctgtaaaggggcttcttgggagggtccagcctcaggaatcaaggggaactcctgagccgaga

SEQ ID NO: 36238 - DNA, 120 bp, Homo sapiens
accgaaagcctgcagagagcagaacatggaaggagacttctcggtgtgcaggaactggtaagaaagtgctttctccagcggcagacccgggctggcgagggagagacgtagacgacatag

SEQ ID NO: 36239 - DNA, 120 bp, Homo sapiens
cgcgaagagctggcctggcttaccctgtagccccggctgccgtggggaacccctccccgccatctcacccacactcccagtcctctgtctgctttctgtttggggctcatcctagaaaat

SEQ ID NO: 36240 - DNA, 120 bp, Homo sapiens
gacgcaaagccattgtagaagaaacaagacctaatcctgttttccttggccccagttagatggggagtttccaggttcagagaaacgttcaggtcatttttcattaaatagatgaaatca

SEQ ID NO: 36241 - DNA, 120 bp, Homo sapiens
agcgtgccctgaggcatggaatgctgccggtgatcaacaacagcttcaactgtagactctgtctaggccagggccaactctccgtaccagcatcaacatctctctgccctggccccattc

SEQ ID NO: 36242 - DNA, 120 bp, Homo sapiens
gtcggtttctctccacacagcctagcctgctgggaggcacaaccaggcaaatgtcacagggcccggcccctggactctggagccctgccctgacagctgggccaggagtgcggtcacagc

SEQ ID NO: 36243 - DNA, 120 bp, Homo sapiens
ctcggcagctctgtgacagctgagctttgttcccagcctaatctgacctggttctccaaagcatgactgttggcagcctgaaaacctccaggacaggaaacaggagtggcgcagggaatg

SEQ ID NO: 36244 - DNA, 120 bp, Homo sapiens
cccgccgggtccctacgctacacctccggggtacggggcggccttcagcgccgcacccgtaggggccctggccgccgcaggcgccaattacagccagatgcctgcagggtccttcatcac

SEQ ID NO: 36245 - DNA, 120 bp, Homo sapiens
accgtgaaactatgctttcctgactcaagagaccctacctagacgtgggcccctttgacgagcacctgcccctcaggagggtctcaggcgaccttcttggaaggtgtgaccacttgaaaa

SEQ ID NO: 36246 - DNA, 120 bp, Homo sapiens
ctcgcgggggcggggcctcctgaccggccggagccggtttggccaccggagacccccatcggtcagctgccaggccccacgcgctcgcggtctccgcgccccgacggctgcgccatgtgt

SEQ ID NO: 36247 - DNA, 120 bp, Homo sapiens
agcgcaattgcaaatctgcgcctggagcctccccaccatcagccaggccccttcaccccacttatcccccgcagcctcgcagacgaccctccttactctcccctacccgaaggacctgcc

SEQ ID NO: 36248 - DNA, 120 bp, Homo sapiens
ctcggaggccaacacgggaaactgaggcgtggaggagccctcctaagccccacagctctgggatgggagccaggcctagccacctgcagggagagagacacggccggcagctgcccctcc

SEQ ID NO: 36249 - DNA, 120 bp, Homo sapiens
tccgggacgtctggctggccctggaaggcacggctagcttacaaacccccagtcttcaggaacctctctgggtacctggcccctgtgttccccggggaggccccaggatccccttgtctg

SEQ ID NO: 36250 - DNA, 120 bp, Homo sapiens
gccggcctgcccagcaggctgcaccccagaagtggctttgacagccggtccttccccaggccccgaaatccctgactcggggccagagagtggagcagggaccctctcctgcccggtccc

SEQ ID NO: 36251 - DNA, 120 bp, Homo sapiens
cacgatgatcaggagcaccagaattcctatccccagcagaagcttacagcgcttatccccgtcttccatgggcactctgcaatagtcatacgaagtagatgccatccagatctccccttt

SEQ ID NO: 36252 - DNA, 120 bp, Homo sapiens
tgcggacctgctcagagccttgaaagcaccagagagtctagtctccatgtgctgggctcctgcacattttcccagaatgcatctgctcatggcccacccttcagctttctctaggcccca

SEQ ID NO: 36253 - DNA, 120 bp, Homo sapiens
gccggtcccgccctcggggtaaggctgaaggggaggggaatcctgcacccactaaaatctggttgtctgtcctggtaacagtgaccaggcggtgctctccggccgggccaacgcgcgggg

SEQ ID NO: 36254 - DNA, 120 bp, Homo sapiens
cccgggaggtgccaggcctgctttgtgccagggtgacattgcccaaaggcaaaccagagtcccccagcgcagggcggaatagggggtgctgaggtggtgcgacgctggccccagcctcca

SEQ ID NO: 36255 - DNA, 120 bp, Homo sapiens
ttcggggccgggcgggacccgccccacagactccaacttcccctccaaaccccgaagtgaaacccgccaccgggttacccccacaagggggccgctgcgagaagttcacccacccccgaa

SEQ ID NO: 36256 - DNA, 120 bp, Homo sapiens
gccgagctgccggcccctggcacacacgaaggtggccccctccctcctcgcaagcccacccgccagtcagaacgtgagctccctcaggaaggaagacagaggccttcgcggccgaggaga

SEQ ID NO: 36257 - DNA, 120 bp, Homo sapiens
cccgaaagtgtcacatgccctggtggtcacttctgatttgttgggcgaggagaggtgacagaaccacccgccctgggctgggcctgctgcggacgcagggggagtgcagggcgtgtctcg

SEQ ID NO: 36258 - DNA, 120 bp, Homo sapiens
ggcgaaagccctcaatttcccctgtaggagtggcgagagggaagccagtctgagagtgcagctcacccagcccctggaggaagaggaaggaaggagcaaaccccaggggcttccttcctg

SEQ ID NO: 36259 - DNA, 120 bp, Homo sapiens
ggcgccgccccccttcctcctccatcagcaacaggcggcgccggccagcctcatagtcagcctcatccacactgaccagcaggcgaacagcctcccggcccacagcctctcgcagggcct

SEQ ID NO: 36260 - DNA, 120 bp, Homo sapiens
tccgcagcgcagtccgatcctaggggcgatggtgtcgtaaatgcgcgtccacctcgagtcacgcccactgcgaggcggcgggaggcggcatgcaaggtgtttctgagttgaaaagaatgt

SEQ ID NO: 36261 - DNA, 120 bp, Homo sapiens
tgcgtgcccagcccccttacacagcctgtgcaggcgggtgggcgggcagcaggctcccttcctcgggcctcccgcctgctccctgccagcgcagcgccgcgggccagcgccattctgggg

SEQ ID NO: 36262 - DNA, 120 bp, Homo sapiens
atcgtcttcctcatgggagccggggtcctcttccttctccttttcctcctcagaatcatccttcctcaaatggcttctatccttgaccactgtgtgtcctggggggtgatggctcatctc

SEQ ID NO: 36263 - DNA, 120 bp, Homo sapiens
ctcgggcttgtttgagggttcacgacccctccagcaaaggagtctgaggctgattccagtagaattagcagccctcaatgctgtgcaacaagacatcagaacttattcctcttgtctaac

SEQ ID NO: 36264 - DNA, 120 bp, Homo sapiens
cacgcagaccagaccgatgacctgtctccactgctggaggcgagtcagggacccgaagtctctaaacactcgcctctacccgccgccccgcgaaccccacacactgcagacgcgacactc

SEQ ID NO: 36265 - DNA, 120 bp, Homo sapiens
ggcggagtccctcttttcgcgccttaagacaggtaggttctgacgatgaaaagcaattgaaaacgacccatttcaccctttttccagtccacgtgaactgctagatcttggctttgcaac

SEQ ID NO: 36266 - DNA, 120 bp, Homo sapiens
ggcgctacataaactgcttagtttctcaaaggctcaagcctgccctgatctgtctacaggatgggtagagatggtcacagacatttaggcactttgatcctaagaagaatggaaagaaac

SEQ ID NO: 36267 - DNA, 120 bp, Homo sapiens
ggcgcggcagtcttacaggaatttcaagagggagggacctgagcaacaatcggaggggttattactcctgaggatgcatctggctggagaaagcagcctttgagaactgcctaagaagta

SEQ ID NO: 36268 - DNA, 120 bp, Homo sapiens
ggcgtccgacccgagggatgggggtggaggcccagccggggctgggaaccgggagggtgtcaggctcccgccccctccactgcgggacaccggccgggggcggggacgggaggggtctgg

SEQ ID NO: 36269 - DNA, 120 bp, Homo sapiens
ttcggggaacctgcaactgtgtcagtctggggaaactgcaaatattcttgtcttacatttgtctccagccaattgtgatggactccagtgacctgcaattgctgttattgcaggtaaaat

SEQ ID NO: 36270 - DNA, 120 bp, Homo sapiens
gccgcctgagcagagcatgctgaaggctgtggtttactgacttcatcacaagccctagaggaaattagtacgtaaccaccttctgtggtcacataacacagccatcatctcactccaggg

SEQ ID NO: 36271 - DNA, 120 bp, Homo sapiens
tgcgttgctaccttgcttctgtgagaattcaggaagcaggtgagaggagtcaagccaatattaaatatgcattcttttaaagtatgtgcaatcacttttagaatgaatttttttttcctt

SEQ ID NO: 36272 - DNA, 120 bp, Homo sapiens
tacggctcagtggtaaggtagctgtagagacacattacggggtaaatggaaaagggaaataaaggggaagcccaggcacatgggtgcagggaggggtggggaataccacttccactttct

SEQ ID NO: 36273 - DNA, 120 bp, Homo sapiens
ctcgtctccacccccttctctgactcttgtcctttccacttctctattccccatttcctctttcgcctcagttccctccttgcccaaaccttctcagtgcccacataacttggtaaacca

SEQ ID NO: 36274 - DNA, 120 bp, Homo sapiens
ctcgctgagcacagctgcacagtgctgtcagaacggccgatctccagcccaagatgattccagcagtggtcttgctcttactccttttggttgaacaagcaggtaagagggtttggtgag

SEQ ID NO: 36275 - DNA, 120 bp, Homo sapiens
cacgcacacaccactgggagatcagatcttctagctggctctctgctgccacagctccgccgaagggagggggtggaagaggaggactaaactcagagctgagaggagaggcaggtgtgt

SEQ ID NO: 36276 - DNA, 120 bp, Homo sapiens
atcgcacttcctgcagtgggcattagccacgtccaggtagaaccaaacctgttgcttttgtatgttgggtcaacttggcctgacgtttcagaggtagacacgagatagggagtttgttgc

SEQ ID NO: 36277 - DNA, 120 bp, Homo sapiens
accgctgccactgcctttgggagacatgaccatgggtccacaaatggctgggtctgttacctgcttgatgcaaccatgccccaagctccacagcagtgctcacctgaaccccaacaccca

SEQ ID NO: 36278 - DNA, 120 bp, Homo sapiens
gccgtggaatccgggttcgtcacccaggcctggatcaggccgcagaacctgaaggtgggggaggtcagacccgcgggaggggcatcttggtccccacctaagccggagcatccaacggac

SEQ ID NO: 36279 - DNA, 120 bp, Homo sapiens
ggcggcggggggcgggggtccaggggcagccaagggatgggagtctagatttcacagtgtggccagacaggaagccccctccctggtccctcaggggagtggggcggtgagggggacatc

SEQ ID NO: 36280 - DNA, 120 bp, Homo sapiens
taggagatggcatctgagaaggcaggagaatagaatggaaacttacgtttactaagcacctgctagatgccagatgttagatgccgccttatatttatctcatttaatcctgaccacatc

SEQ ID NO: 36281 - DNA, 120 bp, Homo sapiens
ttgtgcaccgccgcagcagcggcggccgagcggtcacgcatgagatcgctaaaggcgtagtccatgggtgggcggaagccgagcgtgggcaccaagccggcagtggagtagggcgccatg

SEQ ID NO: 36282 - DNA, 120 bp, Homo sapiens
ggcgggacaagggtgcgggggtggggaagggagggtgttcaaggcataaatgccaggacgatttttcctgccttcttcctgctatgtttcggcgcgctcccaaatccgacgagtttgggg

SEQ ID NO: 36283 - DNA, 120 bp, Homo sapiens
tcccctctaatttctaaagttctgtttttccctctaattctgtttttccctctaatttctaatgttctgtcactctcgtttttgttctctacttttctctctctccttcagaataaagaa

SEQ ID NO: 36284 - DNA, 120 bp, Homo sapiens
aaacggcatctctttggcaatatttaatttaaaaaagaagaaagagacaggcgaagatcaggcactgtctgttttggaggatcaaccattctgcatttcaaagcattggtccctgcaata

SEQ ID NO: 36285 - DNA, 120 bp, Homo sapiens
accaaaattacacacctagttaagtttaggtgaatacagtagagttggaaactggctccaaatgacaatttaattaaatcgtatcaaatgaattgacactatgaaagaaagtctactact

SEQ ID NO: 36286 - DNA, 120 bp, Homo sapiens
gcttagggcctccaaaaatcttaatacaactctgtgtacatcttaaattatcataagttttccttagttgttcagcaataagcattttatttcatgaaaattatagtacgtttacccgta

SEQ ID NO: 36287 - DNA, 120 bp, Homo sapiens
ttagattgttcaatcattttaaatatctaaaagatatagagagggttcctttgttttaacaaaaaaataccaaaggagaaaatacactcataacgtgaattaaaatatagtttttatttt

SEQ ID NO: 36288 - DNA, 120 bp, Homo sapiens
ctacgctacaaattcccttcatcctactattaaaatggcttctatgactcggttctaacttctaaatttcttgatggcatctttctaaatttgcatccagttcatctatagtacacattc

SEQ ID NO: 36289 - DNA, 120 bp, Homo sapiens
gaacgaatactacctttccaagtatcaagtctggaagccctgattttttcaggaaagcagcagcatcagaagccaacacccttccagtattgcctgtatcaacctgaaaagatacaaatc

SEQ ID NO: 36290 - DNA, 120 bp, Homo sapiens
atccgtaagttgacaacaaaatacaaaaggcaaaattatcaccatttacctgccttccatccctgtgatttgggacctggcttttgcaagaaaggaatgagaatcctttgactaccatgg

SEQ ID NO: 36291 - DNA, 120 bp, Homo sapiens
attcgtggggttgtaacatcaacacatatcttctatagctgtcatttaaattccaattaaatggcactaggaagaaaggagcagcatttcctacagaggtcttctgacaaatgggaatag

SEQ ID NO: 36292 - DNA, 120 bp, Homo sapiens
acacgtgcttaagtaagatctggactgccccaaggaggcctagttacatatttaggttacagatacaacactctggacacatttcagatgctaaaaaaaggtcacttccttgacctcctg

SEQ ID NO: 36293 - DNA, 120 bp, Homo sapiens
ctacgtagctgatgacctccttctcctcttctgagaactggaaaatgtctccctgtgctatagatttcttaatatggtaccatgtgcctccccacctctgtggtttacttatattaacat

SEQ ID NO: 36294 - DNA, 120 bp, Homo sapiens
aggcggggtggagttatcatattagacattttctgttccaagtgaatctgagcgttttcaacaactacagtggctgtcattaggacctaatggagctgacagtgactgctatcagagagc

SEQ ID NO: 36295 - DNA, 120 bp, Homo sapiens
atccgccaccacaatacttcctttgcttgtgttttactgaaaactgaaacaccaaggtctcattctcattgctgaatgcttcaacctggttgagaaggcataaaacttggcatgttcact

SEQ ID NO: 36296 - DNA, 120 bp, Homo sapiens
ccacgtttgtctgattctttctgcataccatgctacctctgattttcaagagatacttgaagactgttctacaactttacaaaacaaaggcctgtttttccgaggctcccctgggtgacc

SEQ ID NO: 36297 - DNA, 120 bp, Homo sapiens
cctcgtagatcaaatagtaatcactgctaacattcactgaacacttactcgttaccaatgtgtttcattcacatatattactactgtacttaatcttcataataaccccatgaagtgggt

SEQ ID NO: 36298 - DNA, 120 bp, Homo sapiens
aaacgtggagaattattcctatctcataggattcctggtgaaggtcaagtgagtaagagatctgagaagtactttgtaaactgtcaacataaaatgtaaggggctatcattattcgtact

SEQ ID NO: 36299 - DNA, 120 bp, Homo sapiens
aggcgtgagccaccgtgcccagcccccaatacctaggtttattaccttatctctacctatgaatatcccacatcaacacacatccagtaagaccaccctgagctggctctgtcagctcct

SEQ ID NO: 36300 - DNA, 120 bp, Homo sapiens
tcacgtctgatgactcaactgtttccccttatgagacccaggggacttgagcttgcttttgaaagagttaagaacatggcactccaaaatatgctgctcttccatatcgactattttgaa

SEQ ID NO: 36301 - DNA, 120 bp, Homo sapiens
tgtctgatgtcaatttaattttcaggcccagctgaaaaaattctaaaagggaagaggttttacctcctcaacactttctgtggtctccccgtctctttcaaggtcatggtaattagacag

SEQ ID NO: 36302 - DNA, 120 bp, Homo sapiens
ttgcgttatgacagattactccaaaatgtagcaatttaaaacaacagtttgttacctcatagttttcgtgggtcagaactttgagttctggctcagggtctcttatgaagttgtagtcaa

SEQ ID NO: 36303 - DNA, 120 bp, Homo sapiens
ccacgatgactcacatggctgttgtcagaaagtggcagttccttgctggctgttggaaggtggcctcattcctcaccaggtagcctctccattgagctgcttaagtgtcatcatgacaga

SEQ ID NO: 36304 - DNA, 120 bp, Homo sapiens
cttaggcagagcagtttccatggagtggtaggtatggaatgcaggttggagtggcttgaagagtaaagaggaggcaggaaatatatgaagcgaatggaggttattcaagatgtttcattg

SEQ ID NO: 36305 - DNA, 120 bp, Homo sapiens
gttcgatattcccacttcatgggggtaatcctgttttgtcatccagctgaaaagacagtagcattcatttcagagtggtccttttttaaggtaccgggccttgtagctggaggcagagag

SEQ ID NO: 36306 - DNA, 120 bp, Homo sapiens
tggcgttatgtcagctacctttctttcattaccagaagctactaggattcatcagaaataacctaatatttggtgaatggcattggcttagacagatttgcttcagaccaggaggtagct

SEQ ID NO: 36307 - DNA, 120 bp, Homo sapiens
cttcgcatagaaggcacaggaccagtggcctctgtacctcacagcttcaagagcagataggagggagctcttccctttgccccggttgaaaaacttcctgggagatgactctgtcctgcc

SEQ ID NO: 36308 - DNA, 120 bp, Homo sapiens
ccccgcattaaagctgagtggagagagggagggagagggccctgtgctattgtgaaagaggataatttgatgctattacagctcagataaggtctgggagaatgatttgccggacaggca

SEQ ID NO: 36309 - DNA, 120 bp, Homo sapiens
tttcgcaaagggagattggccccaaaatagccagaattttgtttctctttttttaccccaagccgtgagagcaaaactatctgtctgtctttggcatcagaatgatgattcatgtctgaa

SEQ ID NO: 36310 - DNA, 120 bp, Homo sapiens
aaacgaaaagagagaaagtcaggaaattcatccagtgggacaagactgtgtagctctagtttctttttggtgccttgatagtgtgaccctggagcaacaggcaccttggtgacctcaagt

SEQ ID NO: 36311 - DNA, 120 bp, Homo sapiens
tggcggagagtgaccacatcccttaaaccagaactgcttgagaatgaaagggggatctattcattattgagccaggacaacaggaataatccaggattgttcctggcaaaccaggtcgta

SEQ ID NO: 36312 - DNA, 120 bp, Homo sapiens
tttcgatagaagaatggatgccttttccattatgataagtggaaaggaagcatgctgggtttagatgcaagtgagtcttcaggtgggagggcacatcaggaaggtttagaatttctaccc

SEQ ID NO: 36313 - DNA, 120 bp, Homo sapiens
acccgatggctgcttttgttgttgggagtcctagccaatgaataaagcaataaaagacatataaggtgtaaggcttggagtagaagtaataagactattattcacagcaacttaatcgag

SEQ ID NO: 36314 - DNA, 120 bp, Homo sapiens
ccacgatgtctcaccggattaataaaaatataggcgctcacgcttttgtttaccgatatagtatctcctcctcccctcactccatcaacccccacgcgacacaactttccggaagtaagc

SEQ ID NO: 36315 - DNA, 120 bp, Homo sapiens
atccgttatcaaggtgaaactccggggaccaggctccacagctgccataaactggatggcacgttagaagccggtgggtgtaggtgaggcacgctggcgcccgcgggcccttctccagcc

SEQ ID NO: 36316 - DNA, 120 bp, Homo sapiens
agccgctacccagtgggaatccgcggggctgaagccccgaaaccaggctgagcgtcccagagcgcaacctccctttcccccagcagcgccggcgccgcagaagccgcgtgtccccaggcg

SEQ ID NO: 36317 - DNA, 120 bp, Homo sapiens
gcgcactcccccaaggtgaacccccgccccccacggaggcggctgggtcgcgggtctgggcggggcgctccggacgccctcccgccgctgcgcacccctcccgcgagctgccagctccct

SEQ ID NO: 36318 - DNA, 120 bp, Homo sapiens
gcacgcatctggcttgcttccacttgacactcttgggtcacgtgcagatgactgtgccagtcagtggaaagtctatagtgatggcaccatgactctctctgcctctggaacccttaactg

SEQ ID NO: 36319 - DNA, 120 bp, Homo sapiens
aggcgttgatagcagctctcctccctctgccctggtcatgtctcccttttctggcctctttcaatcctgtttatgccttgcccttcctaaccaggcctttgctgtgttgcttatcttctc

SEQ ID NO: 36320 - DNA, 120 bp, Homo sapiens
ttacggcttttgcagaatggatccttgctcagggaaagtattcacaccatctggcacagaggtccctttcaacctgaggatgaaagcctgcattatattcttaagcaaagccttccctga

SEQ ID NO: 36321 - DNA, 120 bp, Homo sapiens
ttacgtctctctccactacgctgtgaacagcttgaggatagggaatttgccaactctgttatggtccttgcacccagaataggacgttcttgcccaaacccaccattcttgggatctcaa

SEQ ID NO: 36322 - DNA, 120 bp, Homo sapiens
aagcgtcctgttgaaggccctcattcttatagttagccctggggagtccagttctgttaagatgctttcatcaaaaacttcacagttgctcttctgtgctctactctgtagttgggccac

SEQ ID NO: 36323 - DNA, 120 bp, Homo sapiens
ccacgctttgggaccacatgctagctgcccaagactggcaaaataatgcattcagaatgaaaggacaggaggccaataaacaaggatgttgctagtgcctcccagagtcaggatcttgca

SEQ ID NO: 36324 - DNA, 120 bp, Homo sapiens
tgccgaaaatgagtactcctgtaccggggttgtaagcagtcagaggcactgaaaatgtagactaggttaagaaaggctaggctgtaccatttgtggagtttgggacctggtagtcataac

SEQ ID NO: 36325 - DNA, 120 bp, Homo sapiens
ctacggaaggacaaaaatattatcaacctagctccaaaagtgctgttgctcctgaatcaaagtactcattaagaagactaggacaagacacaacttcactaacaagagatgaccgtgaca

SEQ ID NO: 36326 - DNA, 120 bp, Homo sapiens
catcgggcaagtgaatttgctcctgacagccagaccaggataatgtcagaataaggctgaggcccaggggcagagatacaagacaaagaaatgataatcagtccatcccacccaaagccc

SEQ ID NO: 36327 - DNA, 120 bp, Homo sapiens
cagcggctacaggagccccagaatttggggagtcagtaatcagactagacaggcaaggtttaaggaagatccccgtggttctagaagcgagtgggaccaaccacaggttaaagcaggcta

SEQ ID NO: 36328 - DNA, 120 bp, Homo sapiens
ccacgtgcttccttcctttaagcaccacacaccccagtagaatggtgtggaaagaacacagaatctgaagacaaaaggaataatctgagacccagctggtacgacctcaagaagtaaggg

SEQ ID NO: 36329 - DNA, 120 bp, Homo sapiens
acacgttcggcatctactgtgtgtgcacggcactgcactaagggttttacacccattctccatttaatcctttcaacagccttgtgaagtagatagtattacttcatttacatatgaagt

SEQ ID NO: 36330 - DNA, 120 bp, Homo sapiens
ctccgggagtcatcttcccgaagtcacaaaactagtgatgaagacccaagaactgaacccaggtctgtcagactgtaagccctgtaggcttaactattctgccttatgaccttctgaaac

SEQ ID NO: 36331 - DNA, 120 bp, Homo sapiens
acacgggtccataaattaagtcctccttgaggtggaatgcatttctggcacataaacatggctgcctggtgtctcttttcaaacaaatgggactgtgctctattctcaacaagtgtcaga

SEQ ID NO: 36332 - DNA, 120 bp, Homo sapiens
atacgcctggctaagtgatgagggggtcacacagccttggctcttttcactgtacccgaaaagaaaggaagctttagtaatgaaaggattgctgccaaaatcctgtttcccccttgcaga

SEQ ID NO: 36333 - DNA, 120 bp, Homo sapiens
aagtcttttattcaagtctcccagagatttcctatttaagcgtttgctatttggccacttaaaaaagacagaagagaagtaaacagaagcatataccacacaactcagtccagtcagtag

SEQ ID NO: 36334 - DNA, 120 bp, Homo sapiens
tgtcgccacagcaactgcccaggccctgtgggcatccgtggtaacaggcgcagggctttgagagcccaagcttgacttgtagtgagagaaagccccgcagggagcccgataggaaacaag

SEQ ID NO: 36335 - DNA, 120 bp, Homo sapiens
gcacgttgtgctttgagaagttgtctttaacaggattagctatgcaggcgagcctcactttacgcaattggcatgcccctgaagaatgtgtgcgtgtcaaattttggtaaatggaggaac

SEQ ID NO: 36336 - DNA, 120 bp, Homo sapiens
cttcgtaaaacagagtcttcttttgtaaagtgattctgcacccgtgtagtgacctgttatgttagtctagtgctgagtatctattactgggaccatctgcagagaaccccaggggcaggc

SEQ ID NO: 36337 - DNA, 120 bp, Homo sapiens
gagcggacagtgtgtaacagggagaagcagactgggtgtggggccacaatgaggggaggtcaggaaggtgggccttgcctagcatgagcagttctgctgcagcagcggtggggtgtccga

SEQ ID NO: 36338 - DNA, 120 bp, Homo sapiens
agacgcgtgttcttggaggagcccagcatcgacgggtctgtgtccagcgaatcagacatcttgtcacaaatggcatccaccaggcgctcaaaggcctgccttacactgatgttctccttt

SEQ ID NO: 36339 - DNA, 120 bp, Homo sapiens
gatacagataaggacttttcccatcccttctgctggaacccttctgtgccctcagcccaagcactctggattaatatgtccagtgctcagcagtgaagcaaagaggctaaattccacgga

SEQ ID NO: 36340 - DNA, 120 bp, Homo sapiens
tcccgttttgcagggcagaatcattgggttgtatattaaggtgatttttctccctctaatcccccaattacttctattttcctgaaaacaataaatatttctccagaagctgagccaaca

SEQ ID NO: 36341 - DNA, 120 bp, Homo sapiens
agccgatgtgaatgcccacagccctgggttctacagcaccctctgacatgacattccaaagccaaaaccttggcttggcacctggcccagggacttactcttacttactcttttttttct

SEQ ID NO: 36342 - DNA, 120 bp, Homo sapiens
agacgagtcccctgaggatcatttgcatacaggtggcagagtgttctaaaaataggatcaacactcatctccacaaagcaaatgccttgaaatttatttacaagggacaggggacaaaca

SEQ ID NO: 36343 - DNA, 120 bp, Homo sapiens
gagcgaggaagagcctgtcagaggcagcctgacaatgaatggcaagggagccacacagctgtaaggctgggaggcaggaggcctgggtatggtttaatcctaccactaacttgctttgtg

SEQ ID NO: 36344 - DNA, 120 bp, Homo sapiens
ctgcgccttggattctcctctttaaatagggatattagactagattacttttttaaggccccttctagctctaaggagtcaggataaatagtaataattgttataatcaaataataataa

SEQ ID NO: 36345 - DNA, 120 bp, Homo sapiens
acacgaattgagtacttactaagtgtcaagcactgtgacaagcacttttcatgcactacttcatcagtcttcataaccagctctttggagtaagacaaataaactgagaggcacagggag

SEQ ID NO: 36346 - DNA, 120 bp, Homo sapiens
agtcgctaattaccattccaattcagctcaaatgcttcctcctgtatgactcgcatttcctcccatacccacaggcagaaataatgactggctgccatttgtttagacgggctgtgccag

SEQ ID NO: 36347 - DNA, 120 bp, Homo sapiens
gagcgaggtcccattttcatacttattttacagataaagtaatgagattcagagattaaacaccttgcctgaagccatacagctggtaaaagacccgagccagaaagtcaaacttcacag

SEQ ID NO: 36348 - DNA, 120 bp, Homo sapiens
caacgtgcttgtctttccaccagactataaaatcttctagtggtttttatgtaaagtctatataaactcttttcatggttttgtctgtttgttcttgagtgatcaaatgaactgctggga

SEQ ID NO: 36349 - DNA, 120 bp, Homo sapiens
agcagcacaactggtggaaaacttaggctagagtcaggaccaaaccaggaggaagaaaaaaacggtgcaggccctcactctgtcgatcttttcctgccactttaaatccctatgggaaca

SEQ ID NO: 36350 - DNA, 120 bp, Homo sapiens
tcacgaaatgtttcggcacagtcctctgaaatttttcattagaattcttttcttctgaatcatgttaataaagtaagatttggtctgggatttgtacataagtacttactcacatgttgc

SEQ ID NO: 36351 - DNA, 120 bp, Homo sapiens
agacgctgaggcctgtcaacaggaggcagggccaggctcaggaactggaagattactggatggatgttttcaaacagagctacacacagctcccttatataacactcaattggcttttag

SEQ ID NO: 36352 - DNA, 120 bp, Homo sapiens
ctccgttgccttcagagtcaacagaaactggcacttggctccaaaagcctcaaatctctctcatctataagggacagggacttctattatttgtctacaatttgtcaagctgagttaatt

SEQ ID NO: 36353 - DNA, 120 bp, Homo sapiens
ttgcgaagaatttatttagttaatgaaagttaaacaattgtgtttctctcacaaaacaaaaataaacaaaacctcttgaagatggtctctgggctctctaggtctgcaagtgtccatatg

SEQ ID NO: 36354 - DNA, 120 bp, Homo sapiens
tcacggagagcctagagcagtacactggcagtttagaaaacaatatagccacaagcacttctccaaaaagaaaagcaactcccctcttggcccaattccaaaacgcaattgagccgggta

SEQ ID NO: 36355 - DNA, 120 bp, Homo sapiens
taccgtctctctgccaactttctcctgcaggcattaggtttttcagcatgggctttgcaaataatctaacaattaattagtgcttttgaattcaccccataccattaatggaacactgcc

SEQ ID NO: 36356 - DNA, 120 bp, Homo sapiens
ggacgcagttactcaggcatatgaggacaaaaggaagcaaaacaaagaacacagagcaattttatcaagaccttttccttttgccatatatggttcccctcattgccaacaaacagagta

SEQ ID NO: 36357 - DNA, 120 bp, Homo sapiens
gaacgttccaagagctatggcatttttcagccctctagaattccacctgattgacagtgccctctcagaaaacaaaaatatgactagattgaagttcaggataaatgttttttaggccat

SEQ ID NO: 36358 - DNA, 120 bp, Homo sapiens
gatcgttttaaagaaaatgaaagtcagtggctgccatggatgtggtgcgggatgggccaatcatgcgcctcggtgctgagcagggtcagtcctaaaggaaggcctcttgctggcacgctt

SEQ ID NO: 36359 - DNA, 120 bp, Homo sapiens
tcccggaacacttcccagaacactccctgctcctacatcacttccaaaatcagcgtgctcagagctcgaagctctatggggtgataaagatacctccagagttggattaattaccaaagc

SEQ ID NO: 36360 - DNA, 120 bp, Homo sapiens
aaccgtgtgcaagggtaagcttttagcaattaaagagctgtgtaggcacatacagataaagctgtgtcttgatggaagtgttgatcactgtaaaacacaccatcactgctgtcctaaaat

SEQ ID NO: 36361 - DNA, 120 bp, Homo sapiens
ctacgataaggatgcaaagcaaagagaaacctcgattctcttgacttggctaacatcacatctagcaataatcttactcattcttggtaaacatcctcccctccactatatgcacattca

SEQ ID NO: 36362 - DNA, 120 bp, Homo sapiens
acccggtgattgggaaaaggcttaatgaaattctaacagtgaactggacgatagaagaggtcaggacaagagtggccatgtcggtgctgaggctgagatacctaccgaggactgtcactc

SEQ ID NO: 36363 - DNA, 120 bp, Homo sapiens
tcacggcttccagcccttcgacgaactctcaggtgtgtggccttctggccaggcttctgccgcgtcacgttgttgaagcattcgttgtatccctggggttgcagctctctgtaagtttgc

SEQ ID NO: 36364 - DNA, 120 bp, Homo sapiens
tgtcgctgacctgtgtccctgaactatgacacacgaatatgtgggcttagaaatagttttgcttgatacattgagaacaacaaagaagactgagtggcgctaccttctttggtgcccagg

SEQ ID NO: 36365 - DNA, 120 bp, Homo sapiens
tctcgccttcatcctcccccacagttttgcgattttgaaacgggatctcgctctccgcggaagacagccaagctctgcaccccggcctggcccgccgcaccccgcaggcccggctctccc

SEQ ID NO: 36366 - DNA, 120 bp, Homo sapiens
ctgcgcgctccgggctgggcgcggcgcgtgtgcggagccgccgcggtgacacggaacgccggccgccccgggccgggggaggcgcgcgtcgagaggcgacggcgggctggcctggcgcgc

SEQ ID NO: 36367 - DNA, 120 bp, Homo sapiens
ctgcggcgctcgctcacccgctcccgaggaagggcagtgggccccgccgccgcctcccaatggcgaggctgcgggattgcctgccccgcctgatgctcacgctccggtccctgctcttct

SEQ ID NO: 36368 - DNA, 120 bp, Homo sapiens
ctgcgggctctgcgcctccatccacctgctcaaacttttgtggagcctcggcaaggggccggcgcagaccttccggcggcccgcccgggagcaccctcccgcgtgcctgagcgacccctc

SEQ ID NO: 36369 - DNA, 120 bp, Homo sapiens
ctacgtgcggatcaaggtgaagggccgcgcgggcctggcgggagcgggagggagcgtgaccgccgcgagggtggggggctccgggcttctccttccgagacgctggctcagcgtccccta

SEQ ID NO: 36370 - DNA, 120 bp, Homo sapiens
ccccggcgccacaacaacccagaataaacctgctctttttcctactgcaaggggaagctgtctcctgtcacccttttgccctttagagctcagatcagctgtagagaattgttcctcgtg

SEQ ID NO: 36371 - DNA, 120 bp, Homo sapiens
agacgacttaggttgcatgaaacaataagtaaattgtgtgtgttgtggggaggaatgcatacttatgaagtcagggaccaaagaaaggaatggaataaaaggtaaatccagccatgcctg

SEQ ID NO: 36372 - DNA, 120 bp, Homo sapiens
agacgctaattgttcaagcttcctcacagcccacaaatattctgtttcctgaggctccaggtggtgaagggaaatagttcccgtgatacaccctgcagtctgactcacaggcctttcaaa

SEQ ID NO: 36373 - DNA, 120 bp, Homo sapiens
ccccgcagctgaagttcagaagggcaagagaacttctttcttgcctggggtcgacatgagaattaaataggttaatatttataaaaacaaacacgaaaaacttagaacaatgcctgatgc

SEQ ID NO: 36374 - DNA, 120 bp, Homo sapiens
catcgtgcagctgagggtaaagtcagatttgttatctctgttcaacctgaggggtaaaagtagtataagaaccatctggaattccataaaacacttttcccctcgctctggccgcctaaa

SEQ ID NO: 36375 - DNA, 120 bp, Homo sapiens
aaccgagtggaaagagcattgtcctgggagttaggacaagatggagattctggtcacagccctgctctcaaccattttatgactcatgttaccatctttgggcctcatcttctgaatctg

SEQ ID NO: 36376 - DNA, 120 bp, Homo sapiens
acgaccaacccccgccccaggagaaactcgcatctgggtgatcccactcgcccctcactagtgccccacgtaggagaaactttgcccttggactcccggctgcggcgggcaccggtcgag

SEQ ID NO: 36377 - DNA, 120 bp, Homo sapiens
ctgcggcgagccatcccagaccatggagacctaacctcgggaatcaggtcccgggaaaaaagcactttccgttctgctcaccaaaaaatcttgtcctagggaggtggagcccgatccacg

SEQ ID NO: 36378 - DNA, 120 bp, Homo sapiens
gaacgttgactgggaaatgctaggtgtcccgagtcggtagtgcaccgacaatttagcagacaaaaaagacaggacgccagagcgcgcaggctgcattagcagagagcgggggtcgggccc

SEQ ID NO: 36379 - DNA, 120 bp, Homo sapiens
gcccgggcccgggagggaactagctgcccggggcgtcgctctcattaacccccaatcagttcacctaataccaggtcgaaatctgagcgcagcgggagggcgtggctgcgcctgccgcta

SEQ ID NO: 36380 - DNA, 120 bp, Homo sapiens
agccggctccgggggcggtaccccacagtcgaggtggtctggagtaaacgaatctgccttcctcccggggtgaaggcgatggtgaccgggttcacacgtgagctgcagtacagcagttct

SEQ ID NO: 36381 - DNA, 120 bp, Homo sapiens
ctccgtggcctcggctggttcagaaacgagggtgctgggaactctgggccggggcaggacctgcagtcctccggcttcgcgctgtttccactgccggactaggagcccctcggcttccta

SEQ ID NO: 36382 - DNA, 120 bp, Homo sapiens
ctacgtctgtccgttggcgctctcagctcaaacgagtcctacaggccttggtccctgtagggtgcaggccccctgctccagatccccagccccattgtgtccccttctccggaggaatgg

SEQ ID NO: 36383 - DNA, 120 bp, Homo sapiens
agacgcctgggacgtgtcgcggggctcccgcgaagtttcccgctacccaagcgccagaatgcccctaggggtgagagtgccatccgcctccctccggggtggctcctagggctagagctt

SEQ ID NO: 36384 - DNA, 120 bp, Homo sapiens
tgtcgcttcctgcacttctcgtccgtacaattagacgccacaaaccccaaacccaattctttaaacagccacgaaactcggaagaaaagaaaaacggagtggcgttgtcccgagggtccc

SEQ ID NO: 36385 - DNA, 120 bp, Homo sapiens
tcccgctgcagcttggacccacgttggctgggagcgggacagatgggggcggggtaactgtcagcgccggagctgggtctgggctggcgccaccagagaccaggcggacgcggaggccgc

SEQ ID NO: 36386 - DNA, 120 bp, Homo sapiens
acccgggctgtaagcccacgcctctctcgcaccccggcccgctttgctggttcctgtggggagcgacagagtttggaggagataggggccccggggcctgggccgagcgcgtgggaaggc

SEQ ID NO: 36387 - DNA, 120 bp, Homo sapiens
ccccgcgctgcagctggcgcgggaggtggggcggcccctccgcgcgctcaggcctctcctcaccgtccgggcccaggaaggagggagccgagggcgctaagggggcgtcctcccgagcgc

SEQ ID NO: 36388 - DNA, 120 bp, Homo sapiens
tgccgccgcctccccaccagatgtttccttccctggtggatttggctcccctgccgaaccaccagaccgcctgctgcgcgcccccagctccagatttccagtcacactgcgcgggtcgcg

SEQ ID NO: 36389 - DNA, 120 bp, Homo sapiens
tgccggagctctctgggctcccgcacggcggtccgcagcaggtgggaaaccgcccgcgccctctgatcgcccccgcagtgccagtgctctgcgagtccccgcggccgcccccaccagggc

SEQ ID NO: 36390 - DNA, 120 bp, Homo sapiens
aggcgcagaacaggctcggcggacctacctgcggagtcacggcgcgggcaccgcgctaggagagttttcaaacggaatcttgctttcgggagagaccgctctatctctctgacttaaaaa

SEQ ID NO: 36391 - DNA, 120 bp, Homo sapiens
ttccgagctcagcccccaaaaccacaagcttcacttcctgagcgttactgagtcgctcgcatagccctcccagacctgctcccaacccccgtcgggcggccgggcgcgctcctttgcgca

SEQ ID NO: 36392 - DNA, 120 bp, Homo sapiens
ggccaggcggtggggggcctggcctttccagcccgtcccgcgcgccccttagtagtcctcccagttctctccctgtgggtcggcaggggatgggggaaattggaggtccggacacttagg

SEQ ID NO: 36393 - DNA, 120 bp, Homo sapiens
aggcgtgagccactcactgcacccagcctaatgaaacgtcttaatacagatatttttttcacctgttgtgcttagcactccaatgggcccttttaatttagaaaaggaccaatcggagtg

SEQ ID NO: 36394 - DNA, 120 bp, Homo sapiens
gagcggggagtcgacctgagcatgacgaggggcagcggtgcagcacagccctgttttcctaatttcttttatgacatcctcctccatattttctttctgaaactcctgtctccttgccag

SEQ ID NO: 36395 - DNA, 120 bp, Homo sapiens
agccggtgtcatagtattgggttctatgagcatcaagcagtgagcccactgcttagtaataccagtatcactcactgaacaagaatttatttagaatctactttctaaaagaacacttta

SEQ ID NO: 36396 - DNA, 120 bp, Homo sapiens
tgtcgtcataaacaaaatagacatggtcctttccctcacagagctagttaagaagtcagacaaatagtgaataaataaatgcagagaaggatacatgacatgagggcaaaacactaaaga

SEQ ID NO: 36397 - DNA, 120 bp, Homo sapiens
caacgtttaagataagatctatgaaatgagcaggaagaagccagataaacaaagagtcaggcaaaaaaaaaaaaagaaggaaaatgtacaaaggccctgaagaactgaatattttgatgg

SEQ ID NO: 36398 - DNA, 120 bp, Homo sapiens
gagcgaatctccgtctcaaaaaaaaagaaaaaaatttctagaagaatgttgctatgaaacagaccaaacatattgttatgaatttaaaggacttactgaaccagtttaaaataagacttc

SEQ ID NO: 36399 - DNA, 120 bp, Homo sapiens
tgacgaaacccacccgagttgaatgaataatttcatcaactatggaaactataccacaagggggcaataacaatgaacagatgtatactaccaggttttaagtaattttctaagatgtgt

SEQ ID NO: 36400 - DNA, 120 bp, Homo sapiens
ccacgtctctcgtcaacaccctctcccgttccccgtatcaacgatactaaatcttcaccattttctagacttgcacttcatgttcgcgttctcatcctctctctctctcagccattaaaa

SEQ ID NO: 36401 - DNA, 120 bp, Homo sapiens
gcccgcaacacacacatcctctccactctttccttccttcggttataatagagtctgcaatttattttagaattcctcagcacacacagtttaatatatgtgtgtaagttatagtccaga

SEQ ID NO: 36402 - DNA, 120 bp, Homo sapiens
gctcgaggcagctactccaagcgcttctatattccttatctccttactttgatcaagattggtcaatttctgagacttgttaattaggaaatctggcttttattggtgaaatttgtcatt

SEQ ID NO: 36403 - DNA, 120 bp, Homo sapiens
ccccgggaattggcaaatatcccaacaggataactggctgtatgcatgaggttcccctggttttccacaaagcctctgctgatttcttgtccccagtaggggctttccgccaacataagg

SEQ ID NO: 36404 - DNA, 120 bp, Homo sapiens
atccgcacatatgagaagcgagcctgtgagtaaaaaagaacataacgatcattcattcagcaccaaatcagcattcaatgtcctagaacacgacttctcacccttcttggaacaactcaa

SEQ ID NO: 36405 - DNA, 120 bp, Homo sapiens
actcggttgtgccaggaggaagtctaaagattttacacaggaagtgtcacagacatgccctggggtgggtgcaattctaggtcttagccactgaggaagtgacttctcctggcaaaagct

SEQ ID NO: 36406 - DNA, 120 bp, Homo sapiens
ctccgctgtccctagagcagaaggaagagtgtaaggatggatgcacatctgagggtggggaggtgggacagcttctaccagatgatttctgttttctctgtctttcagaattaagagaga

SEQ ID NO: 36407 - DNA, 120 bp, Homo sapiens
gatcgatttttccatctattaataattttaaattacaaaacatttccaaattcaggaaaaaatatccatatagaaaattaggaaagtaatataaaaggcagctctgtacccaccactaaa

SEQ ID NO: 36408 - DNA, 120 bp, Homo sapiens
aaacgggtccaggctggttctccgatgcctcaccatccctgagtcatatctggggtcaagaggagggaggatttgcagaggtttctttggagagatgtacttgttctcctgtgatcactc

SEQ ID NO: 36409 - DNA, 120 bp, Homo sapiens
aagcgaagatgttctgattattggccctaggtgtagagcagagagtgtcactcagatttcaacaagctgcaacctaggcatcccaaaaggtagaacagaatttctctgtatctgcttttc

SEQ ID NO: 36410 - DNA, 120 bp, Homo sapiens
tcacgagtggtcaggcagctaagagacgggaagggctccttccatctaagaacctagggcaagctctttgtgttcaaagttcttgttgattccgagcaagtaaaaccttcagtttggtca

SEQ ID NO: 36411 - DNA, 120 bp, Homo sapiens
acacgtgggtgtttggaaaattttatcagtactttgctattaaaattctcacctaactacaaatcctctatgccacagagaaatttaaagggttcttatttactcaccataacaagtatg

SEQ ID NO: 36412 - DNA, 120 bp, Homo sapiens
atgatttattgttcataattgttgatctcttgagtcagaattcaatggactgatctcttgaatcacagtcagctgataacattctttaattgtacgttgccaggatccacccctagacct

SEQ ID NO: 36413 - DNA, 120 bp, Homo sapiens
taacgacgcaagtgaaggtgggaaagcagagcacacacctccattccaaacacattctctggcagagcaatgttaggaaaaactacatcgggaattcaaaaatctagaaattgattccct

SEQ ID NO: 36414 - DNA, 120 bp, Homo sapiens
caccgccagcacagggaatatatggacatgagcagtaaatactttttgatgaggaaaagagaaacagcaaaatgatgagcagcaaaatagcaacatgatacagtttatgaaaggaagaac

SEQ ID NO: 36415 - DNA, 120 bp, Homo sapiens
agacgctaatcttttagcagtttttttttctttttcttttttatcaaaatgaactgtatacaagattttctggggaaaaaagttccatcttatttttattcctctcaagttatttactct

SEQ ID NO: 36416 - DNA, 120 bp, Homo sapiens
cagcggataaaagatccaacacatttctagtttcaaaaagcaaatggaattgtgttgatggatgaggcaggcagagaaagccacagcccagaatactctaccaggcaacctaaaaggagc

SEQ ID NO: 36417 - DNA, 120 bp, Homo sapiens
ctccgagccaacaggtacaagggagggcaggagtgagaagtgaggttgaagacggtgggaataattgaagatctgtacctggaactgcactggttggcacccccaaccacctcccccacc

SEQ ID NO: 36418 - DNA, 120 bp, Homo sapiens
actcgaaaaaccagatagctgaaagaacaaactgcagaaagccaaggcttctagtgtgggtatgtatagtccaacaagagtaaagtactccgctggcacgagggaccccagagcccagca

SEQ ID NO: 36419 - DNA, 120 bp, Homo sapiens
ttccggtgataggtctaatgggaaaacagactaacttttaaaacagcagaggaaagccacaccagttacctagtccttctttctaaaatatgaacagacaaccaacaatcaccaagcaca

SEQ ID NO: 36420 - DNA, 120 bp, Homo sapiens
aaaccataaaaagaaacaaataacttttaaattaaatataagatccttagagtttaaaaagtggttagaaaaggaaagaaaatcaacaaacgatctggaaaataaaattgagaaactcaa

SEQ ID NO: 36421 - DNA, 120 bp, Homo sapiens
acccgtgcaaagaagcctccaaggagaccttgattctcaggctaaacagtgtcctgcctgggactgtcagaagaagtagaaaaagacacctagttgcccagggaatatgaatttggaccg

SEQ ID NO: 36422 - DNA, 120 bp, Homo sapiens
ctacggttaacaaatgatttggctccatgaccagatagctggcgaattttcttcacttttggatgcttttatcctgacactctctgctgctctcttcctaggtaatgtagagttcttaat

SEQ ID NO: 36423 - DNA, 120 bp, Homo sapiens
aatcggtacccacagatgctgcactgattcaacttggcaagagacttagagcgtctcaggacaagttggaaactgaaaatagattctgcccattgactcagcaggattggggggttgcct

SEQ ID NO: 36424 - DNA, 120 bp, Homo sapiens
aatcgcacaccaagttagaactcgtcatgtctaagatgtcctattccagtgtggtctcattttgttccaaaggtggttttcttttttaaaaacagaagtattgacagttggtcccatgtt

SEQ ID NO: 36425 - DNA, 120 bp, Homo sapiens
ttccgctttacagactctaacaaagttctacagatatgaaagtctggtgacatttcccttctctttataaagtgtggatttcacagaacccactccctgtcaaggccatctggggaagtg

SEQ ID NO: 36426 - DNA, 120 bp, Homo sapiens
atacgaaaaggggagaaacatttttattagtgcttcttgtatctttatagtctttcagctacgttttttttgccacatcatttaaatatgtttttatttttcctgttaagttttattttc

SEQ ID NO: 36427 - DNA, 120 bp, Homo sapiens
ctgcgccacctccgtgcttgcttaacatcctgttgcatgtctagcgtgattgagctagatttttcaggcatgtctttagattcccttgttcttgtcaaagccttgttttgttttacattt

SEQ ID NO: 36428 - DNA, 120 bp, Homo sapiens
ttacgaagaagtagctgtgaacctgaagtatttatgataagaaaaagaaaacatctctgctgtagcctacagcccagttgaaagaactctttgaaacgtgatacatcttcagcacctcag

SEQ ID NO: 36429 - DNA, 120 bp, Homo sapiens
gcccgcttggaagtcagtggttccaggaagataacatggaaatggtggtagactccagagacagggaagaaggaagtttcaacatagccctgccctggggctgggtgggcagagtccagg

SEQ ID NO: 36430 - DNA, 120 bp, Homo sapiens
gctcgctgcctggggaccccatccagccccttgtccaggggtgcctgcaggcagacatgagagtgaggccccactaggaggacaaaatgcaccacagcaagccagggagactgcattctt

SEQ ID NO: 36431 - DNA, 120 bp, Homo sapiens
gggcgggcaggcaggcatctctcctccacctagaggatcattaagccctgcccagggccacaggaaggattcattcccctgggaatcgggctgctctgtaaacccaggcctgtttctacg

SEQ ID NO: 36432 - DNA, 120 bp, Homo sapiens
ccacgcaggttcataccaggccagagtctccctcctggcccactgacatggttctgctctcagattcagggcccaatgtgcctgactgactagaacagaaatcctcaatcctcctacctc

SEQ ID NO: 36433 - DNA, 120 bp, Homo sapiens
gctcgctttaaagtgaggtccggataacttcgcaaattgcgtgactacctgtgagcactgcccgaggccatctggccaaaagtacagcaggcccttgttcttccagtgcagccctggctc

SEQ ID NO: 36434 - DNA, 120 bp, Homo sapiens
tgacgtctgaagctaattgacttcactgagctacaaataaaaaagggcttcaaatgcccaggaaccagcctctttatattgaaaagatggaccgagcccaccatcgcctgagacaacatc

SEQ ID NO: 36435 - DNA, 120 bp, Homo sapiens
cagtcagccctccttatccgtggcttctgcaacagtagattcaaccaaccaaggatcaaaaatattcaggaaaaaaaaaaaaaaagctgcattggtatgaaacatgtagacttttttcct

SEQ ID NO: 36436 - DNA, 120 bp, Homo sapiens
ttacgacatgatgcccttccccccagcccctgtccacacacttcctgtcatgttgtccttggttaatgattggccagatcaggtttacaataaaaacccaagggaaattctatgcctcaa

SEQ ID NO: 36437 - DNA, 120 bp, Homo sapiens
tgacgatcacaaagtatattctgggccatgagtctgtggtcatgggtttaattccccttttttcccacctctgggtcacaggatccagtagggaagtgatggagagtgtgaataactgcc

SEQ ID NO: 36438 - DNA, 120 bp, Homo sapiens
tcccgaagctaagccactgccttgagaaggaggggctgcaaatggtctgaggctgctggcagctggccaagagttcaattacctgggccacagcccgccctcctagttcttccggttact

SEQ ID NO: 36439 - DNA, 120 bp, Homo sapiens
caacgctgtgcttgcagaccccaggagcgctggctgtcccttcacttcctgaacatgtggatgtgtgctttgggttcttgacctcagctcttcccaaggtcttcttagagaagggtctaa

SEQ ID NO: 36440 - DNA, 120 bp, Homo sapiens
acacgaatttgcctctaggaagagggagagggattcatgttgttggaatgtactgtgccactggtgtaggggtgagttctgctcccacacccagcacctcccagccaggggaaagcacaa

SEQ ID NO: 36441 - DNA, 120 bp, Homo sapiens
tcccggtacagtcacctgcgagggcaaccctcatgacttctttccaggtcaaaggacaggacgtttacatcatctccaaatcacattcaaatcttcccaaatgtgctccttagacagtcc

SEQ ID NO: 36442 - DNA, 120 bp, Homo sapiens
gcccgtaggggtttccttctccccttaagaagccctagctccaaccctgtcctccagggttcagctactgaagcactcattaaaatgactggtgcccttgtctgttggcctcatgaccca

SEQ ID NO: 36443 - DNA, 120 bp, Homo sapiens
agacgtggctcttgttcatggtatttgcaagaaggtaggggcccttccctgtctctccaaaaatagttcagaactgcagaggcgtgagggatgacaggccacacagaagtcatgctcctc

SEQ ID NO: 36444 - DNA, 120 bp, Homo sapiens
atccggctgaagactggtggtcacaggaaacagtccatcagtttccttatttcttctgtacaaaaagctcttttgagaatgtgaatgggggctttatatagtaagttctcatccacaggc

SEQ ID NO: 36445 - DNA, 120 bp, Homo sapiens
actcgaaaggaaattgccttgaagggccaaacagcatgttctcattcccagggtctgacacatccttatcttcattcacataaaggatggatggagctcagccagcaaatccacactggg

SEQ ID NO: 36446 - DNA, 120 bp, Homo sapiens
atgcgcacttccagcctgtcccaagtaaatggatccctgcaacaaatttctccctcgactacacttgcatactcaggcagagcaccttgccataacccagccttggcctcaccaagcttg

SEQ ID NO: 36447 - DNA, 120 bp, Homo sapiens
cttcgcatcgtacatccttctgattaaccctgagctaaaggctggtgtatttgcgtgtctgagggaacatcttgctttgttaaagagaaggcagtagttacagaaaccaatggttctgaa

SEQ ID NO: 36448 - DNA, 120 bp, Homo sapiens
tgacgagtcagtcagttccactcatgcaaactaatgaaacaccacattgtcctaccacatgctcccacagcacaagaggccgaaggaattaggcactcacagctgttcccaggaatgtgt

SEQ ID NO: 36449 - DNA, 120 bp, Homo sapiens
ccacgtacccacaggcaggaaaaagacctgaatggtatccaagcactgatccctcagctatcctagcaacacagacatcccgacaacaggaaccagtcccctctcagcccaaggaagatt

SEQ ID NO: 36450 - DNA, 120 bp, Homo sapiens
cttcggaggctatggaacacactgtctggggaaggccctataatactttctaggttctaatcctagctcagttatccattaaggtatgatcttaggtgcctcaacatccctgaacccatt

SEQ ID NO: 36451 - DNA, 120 bp, Homo sapiens
aatggaggaattaataatggaggaaatgacacatgtagatatgaaagcttaatcatgcaagttttaaggtcaaagaggagacttcctctgctttgtcttgggcctccgagaggatgtatt

SEQ ID NO: 36452 - DNA, 120 bp, Homo sapiens
ttacgttatcctcaataccccctggcacgcccgcagacaagcgctttgcctgtgggcttcccattgttacccgggtagccccttcccacttggacctgtgttgagctgggccccaccccc

SEQ ID NO: 36453 - DNA, 120 bp, Homo sapiens
cctcggccagcgtactttccttggggaggtctgtgtagccttgggagataaagtcaaggtttaaaacaatctgaatgcacggctctactttccatctcagctaacagctttaagcgaaaa

SEQ ID NO: 36454 - DNA, 120 bp, Homo sapiens
taaaacaatctgaatgcacggctctactttccatctcagctaacagctttaagcgaaaacagatatgaggttaggaaaatggtttttctcctttgcaccttgcttcaagcgagttaaccc

SEQ ID NO: 36455 - DNA, 120 bp, Homo sapiens
tagcgccgtcctggggctgtggagcagctgcctctccagtgcccggggtttgccataaatgccgaatctcagccccaccctaaggcactgactcagaacccacattttaacaagcctccc

SEQ ID NO: 36456 - DNA, 120 bp, Homo sapiens
cctcgtctgtctcaggttcatgaacatgaaggtgagagcagctcttcctcacagcatgaccaggcagtgacaaacacgccacatggaaggaaatgagtgaacaatcctcgcatattctga

SEQ ID NO: 36457 - DNA, 120 bp, Homo sapiens
tagcgtcccccaaagtgcaaggtgctggggacaacagatcaggtggtcctttaaaacactttatacaaaaataatattatactgttaccaccttggtaacacagtaaaaatagaggacag

SEQ ID NO: 36458 - DNA, 120 bp, Homo sapiens
acacggactgctgtgattttggtgactagtagggggcagaaactcgaaagtagctccagggacgctcacctcttgtgctcctatcccactgtccatctcccatctgctctgggctctcag

SEQ ID NO: 36459 - DNA, 120 bp, Homo sapiens
tcacgacagctctttgaggcaggtattattatccctattttatagatgaggagattgaggtgcaaagagaggctaagttgcccaaggttgcatgtctaaaaagtatcagaggatgagaat

SEQ ID NO: 36460 - DNA, 120 bp, Homo sapiens
ccacgtcattccctccacacctggtagcttcagccttgcccagctcctggtggaacttccggtaagggatgctcacagagcacagggtggggagctcccctggcacgtggaaatcacatc

SEQ ID NO: 36461 - DNA, 120 bp, Homo sapiens
ctccgggatcctgaaatgccctgcatgaatcatcaagggacaaaaagaggagactttccagggactgacgccctcccagccaccgtgggatcccggctactgtgactgagcccagtcatg

SEQ ID NO: 36462 - DNA, 120 bp, Homo sapiens
catcgtcaggccaatagcctctttctgcccacattcccctcgccctcccacattcctgttccctggcacctggcccttgagcataatcctgtcatgcatcgacatcattctggtctatca

SEQ ID NO: 36463 - DNA, 120 bp, Homo sapiens
gaacgctcagattaattcattccatcttctctgaaatcttcagagaaaccccacaaccctgcaggcccaccccatcacaaatctagggtaagctcaacttcatctagaattagagcccat

SEQ ID NO: 36464 - DNA, 120 bp, Homo sapiens
ttgcgctccctgaggttgataatgacttcttcagtgtatgatcctgtggacaggattcagaacttgtgttacttggcttttctgctatatttgacattgttgactgcttcctcttttgtg

SEQ ID NO: 36465 - DNA, 120 bp, Homo sapiens
caccgttttctcctgactcttttgctacctctctgacagtttccagcctgtctttctgtgtgtcctctttccccaaccaccttgaaaatgggcatatccaggtcctgcacttggtctact

SEQ ID NO: 36466 - DNA, 120 bp, Homo sapiens
agacggtttaaaatttgcacactccacagccagcttcctcttctcttgaattcccacatattaggatggcatctccatccagctattgcccaagctggaaccctgggaaccaccctgggt

SEQ ID NO: 36467 - DNA, 120 bp, Homo sapiens
acccgcacacaaataacacacagccaatctctcaccaaggcctggggactttatccctaaggaatcctcaaagtcatgccctcctctccttcccccaccaccactctggcccagggtccc

SEQ ID NO: 36468 - DNA, 120 bp, Homo sapiens
tttatccctaaggaatcctcaaagtcatgccctcctctccttcccccaccaccactctggcccagggtcccttcctctctcgcctggactctccattgcttcccagctggtctccctccc

SEQ ID NO: 36469 - DNA, 120 bp, Homo sapiens
gggcgtaatgagaatatttgcctcttggactggcccttgagaattagacccaatgatgtcaaaggagcatggagcacagggcctgccacacgcaggcactgaataaccacagcggtcatc

SEQ ID NO: 36470 - DNA, 120 bp, Homo sapiens
catcgtgaggtccccacttgccttgaagggagctgtgtggctgagttctccgctgtcactggttcccttattgagcttgccttagggggcccaaggcctccttccaacccaaaacgtgcc

SEQ ID NO: 36471 - DNA, 120 bp, Homo sapiens
cttcgagaggggcagagaccggccaccccacgtgtcttccattggaatggaagtcagggttcaccaggctgggggagggcattgatgccctcatgtgcatcggtctgttgggccctgaga

SEQ ID NO: 36472 - DNA, 120 bp, Homo sapiens
agccgaattagcaagcatttataaaaagtggaaacaaaatgaagccactgggacaaaagagacactgcacagaccaaccaccgtgtgtgatgaggggctgggcaggcccacaggggcctg

SEQ ID NO: 36473 - DNA, 120 bp, Homo sapiens
tatcgatccacccactggcgctgtggcaatgaaattctcacgggggaaagtctcagggccagcatacctacccctgcacacttcatgcccccaagcacagcacgccattgcagcaggccc

SEQ ID NO: 36474 - DNA, 120 bp, Homo sapiens
ctgcgcccccatgaatacgccctgtacccattctgagaatcaggtctgatattatgggaagaaaatgtgtgcctaggcatggcggggaggggcaagttaggcaggtcaggagggagagtt

SEQ ID NO: 36475 - DNA, 120 bp, Homo sapiens
ttacggcaggttattcagcctccctgtggctgcctttcttcaccactgaaatgaggataattatggtaaccatcattctacctcatagcactgttgtgagaatttaatgagttagaatga

SEQ ID NO: 36476 - DNA, 120 bp, Homo sapiens
gcccggtctcaaggctgcgatgaataaggatcctagagtcacccagaaacaactacgctggagcttctgcaggttaacaagaggattctcatacactccaggtactgccccagaagtcac

SEQ ID NO: 36477 - DNA, 120 bp, Homo sapiens
caccgcccattctgcctagatgtttctttgcctgttgtctcagcaggttacaattaattacaaataacagtgactcacaggacagcagttcccttatttgccagggaagtcttattaaga

SEQ ID NO: 36478 - DNA, 120 bp, Homo sapiens
tattctcccaggaaagaaaggtctttacttttcaatagaggtagagggaagcaagcagaggactgtgattacagcacagactctggagccagatcgtctgggtttgaatctggccccatc

SEQ ID NO: 36479 - DNA, 120 bp, Homo sapiens
caacgaggtaaatagcagtgtgtaaaagcaatggatctgacaggttttgcaaggtggtaagccgagggggcggctcaaaagttgccagcatagacaggaggggaggggtgcgggagggtt

SEQ ID NO: 36480 - DNA, 120 bp, Homo sapiens
cttcgcagactgctacaataaaggaaggagataaccatatccttctactgctcacttatatagaacctgaatagagaaaagagtaagttgagaacttctgaaccatgaccttcagtaatg

SEQ ID NO: 36481 - DNA, 120 bp, Homo sapiens
ctccggcctctggcagatgggactgatgttaagctaaacccacaggaggtaggatgagtccaaaaaccatcttaactttgtttccaaggggccttttttggttttgcctgtttttctctc

SEQ ID NO: 36482 - DNA, 120 bp, Homo sapiens
aaccggtttcagttcactcttcaatcttttcaaatgtcaccaccatagagtcccctatataacttaccctattcaccaccacatcatatctacaaaaaaagaccatctcaataatccccc

SEQ ID NO: 36483 - DNA, 120 bp, Homo sapiens
ccccgccagggctgtgccaaggacacaggcaggaggaggttggcaggctgttttattttttagcaagcactggcagtacttagagcattcagatgatttctgttgatgctcgtggggatc

SEQ ID NO: 36484 - DNA, 120 bp, Homo sapiens
cttcgggcttgcaaaaacagggctcacaactttcatatcaggagagtcgattgcacatgtgaagaggccaattaaaaaaaaatcacaaggagaagtgctgcgataagctaagtaggcttt

SEQ ID NO: 36485 - DNA, 120 bp, Homo sapiens
ccccgatgaagtcagagcttttcccctcccaagggcatctgtttccaggctgcaaaagagaagaacgagggggagtccacaggctgcagggcagcagagcagcgtgctcatgactgctca

SEQ ID NO: 36486 - DNA, 120 bp, Homo sapiens
ctgcggtctgttcaaagcacactcaagggaaagagagaccaatgaatctgcccaattgggaagtggttttgagcaagcactgatgttctgacaacacactctgtcttcagattggtccct

SEQ ID NO: 36487 - DNA, 120 bp, Homo sapiens
tctcggccaggtcccatgggggaggggcggccatggccggtggctaaggacaggcctatggaagggagggcctgggggtgacctggctcccggtaccggatcccatgcactcataagcct

SEQ ID NO: 36488 - DNA, 120 bp, Homo sapiens
tcccgagtgagggcctcctagagctcaggcctgcctttctgtttttggcttcttggcctttactgcgtccttggggacaggctactattttaggtagcagtcaaaataaaactgagatta

SEQ ID NO: 36489 - DNA, 120 bp, Homo sapiens
acccgccacggtccatggggtgccctggggatactaaggcctccatcctgcgctgggtcacctctgcacactctaagccgcaggcagccactagaggactgtggggctctgagggacgct

SEQ ID NO: 36490 - DNA, 120 bp, Homo sapiens
acacgagacgttgccaggttggaagggtgacttattactttctatatcataaatcctcttgcctaagtcccagtcccagggactggtgggctgtgagggaacagaggaggcttgtgttcc

SEQ ID NO: 36491 - DNA, 120 bp, Homo sapiens
ttccgggctgggctctcagggcaggaaatcacccggaggaatatgtttgtgctttgattgctgacaagggccgcagaccctctagtcaggcgaacaggccccttcctctttgcaggagcc

SEQ ID NO: 36492 - DNA, 120 bp, Homo sapiens
gagcgacaggattaggcccctgagagtaaaatccttcactctaacccagaaagaggaaaaaagaatgggagattcaaatagatgggggttgagatgatgtcagtaaaggtcaccgcctga

SEQ ID NO: 36493 - DNA, 120 bp, Homo sapiens
agccgtgattagaggcttgggcagacctctaagctctcaggcaagacctcaaaatgcctggaagaaagaaaggaaccaatagaccccagctccagaggcagtcccagaggtgtagctgga

SEQ ID NO: 36494 - DNA, 120 bp, Homo sapiens
ggccgagctgccctgttggcatggaggcaaacagataccctgcatggtgacaggcttgcattcctttagggaaaggccatctgggcgtggacacccagcattcaaaggagcgatgtgctg

SEQ ID NO: 36495 - DNA, 120 bp, Homo sapiens
ccacgatggaagctgcttttgctgatgactgtagctgcgcactgtgcccctctcaaccttcagcatcctccattgactcctcgctccagggtcctcaggcccagtcttttccaccagctc

SEQ ID NO: 36496 - DNA, 120 bp, Homo sapiens
gcccgggctctcctccaactgtcccagccaaactctgccttcttccagtgctggtcaatggcctgcaggcatgccggcatctgtcatgccctcttttgccagcatacttccctcgacgtc

SEQ ID NO: 36497 - DNA, 120 bp, Homo sapiens
ttacgggttctactgaatgtagatagtttttgcactgtcaagaagcctaaaaattgtaagttgaaccatcatatgttggggaccaaccagatctgacatgctgtgagaggagtagcactg

SEQ ID NO: 36498 - DNA, 120 bp, Homo sapiens
caccggaagccctgacgctgggatggcttctcagagttgtctgagattgaggccagggagccaggccttgatacctctgcatcagccagtcatcaggaggggtatactgtgggtgggcag

SEQ ID NO: 36499 - DNA, 120 bp, Homo sapiens
caacgtctgggatgtcctggctgtgagccctcagtgggcaccactccagcatctggggaaatgagagcctctgtcctgagatggagaactggggccacatcagcttgcactaaaataacc

SEQ ID NO: 36500 - DNA, 120 bp, Homo sapiens
ctacgcttctctctagtacacattttcagttttagcacttaatttctgaaacacttgaatcttatgcatgtttatatataaatttagcagaatattaaagcataaatctattatcaaaca

SEQ ID NO: 36501 - DNA, 120 bp, Homo sapiens
tctcgcctggtgagcttttctccttggaagccctccctgtccctcccccgccaacacctggctcactcctgcccatccttcacgtccacagagaggccttcactgactccccttacccga

SEQ ID NO: 36502 - DNA, 120 bp, Homo sapiens
tcacgcttgtaattgctgcttcaaaactgggctgacagtgggtgtgcagagatatctggttaactgcatggcattccagcccgccacacctgggacctagattgagtcttatttgccact

SEQ ID NO: 36503 - DNA, 120 bp, Homo sapiens
atacgtcctgtactctgcatatccaaatcgctttccctcataccaaggaactgaaaacccccagggtatggccctgttagatgctctacttgaggtctgtggcaccaacctggcaaaatc

SEQ ID NO: 36504 - DNA, 120 bp, Homo sapiens
tatcgtggagcagtgatgagtcctctttgctgtgccatttctgaatttctgacccgcagaatccataagcttgataaaaaatagttggggtttttctgccactaaatttgtgctgtgtgt

SEQ ID NO: 36505 - DNA, 120 bp, Homo sapiens
catcgtaatcagaacagtcacactgggtaacaatgaccatggtaaccaagaaacaccaccaaacgcccggcacaccggcaagccctgcacactcacctcccttcatcctgaccagaactc

SEQ ID NO: 36506 - DNA, 120 bp, Homo sapiens
cctcggcttggcttaactgcaaagcccacccctaagctgcagctgactcctcccatgcagtgggtgacaggaagactgtcaacataaacctctggacttccactctgacggcctttccct

SEQ ID NO: 36507 - DNA, 120 bp, Homo sapiens
cctcgggctcaaacagccatgtaacttcacctcagaagccctgctttgcctcataaaccttggccaagcccatcggacctagttttcttctaaactgcagggagaaaatatcaaataatt

SEQ ID NO: 36508 - DNA, 120 bp, Homo sapiens
gggcgtgtggctggggctgctgccctggcaaggcctccccagcctggcggggaacagccatgccagctttggctctggtatctgtggatgccctgggttacagatccgcccacatgaccc

SEQ ID NO: 36509 - DNA, 120 bp, Homo sapiens
agacgcatgtgattttgaatgtctttaggaacacagctgagaatgcatctctttgctgtgcacttgaaggtttgctttggcttttcacatttattccctgggcagtaccacctacacact

SEQ ID NO: 36510 - DNA, 120 bp, Homo sapiens
ccacggctgcagacatttgtcctcaatcttgactttcagttgtgccatcacatgtcaatcggttgtgaagtaatttgttatcaataataggaagtaccaaaggtttgaaataggagtgca

SEQ ID NO: 36511 - DNA, 120 bp, Homo sapiens
ttacgggcttatgggtactttaatgtgacttaaatcacaggaaatcttgcagagaagagcagataagaaatgctcccacaaccttgctcccttcccccaacacacatgtacacgtacaca

SEQ ID NO: 36512 - DNA, 120 bp, Homo sapiens
attcgtctttcaaagccaaggacttttcactcctcagcaaagtatttctcaatcaaaatgcttattgaacttaaaactgaatggccatctaaaggttgggactagcactcccacagtcga

SEQ ID NO: 36513 - DNA, 120 bp, Homo sapiens
ttccgggaaaaccatgcccacatcctactggattcctctagctttggtgttgtcaacacagagatcactgagagtttaactccaaatcgcaggcctccattgttccctgaacacaaaggg

SEQ ID NO: 36514 - DNA, 120 bp, Homo sapiens
catcgtccacttgtgcctggggcatgtaacttttgggaggcagctcccactggctgaaggcaactcccagggaaggaccgacccatcagcaggcagcactcccgaagtcaggaggactag

SEQ ID NO: 36515 - DNA, 120 bp, Homo sapiens
ctgcggcctctggtctgcactgctctaggtcaacgccttggcctgatccatcaggatacagggccaggggaggacaaagaagagtttccagggagccctgccagtggctggaaaagaaca

SEQ ID NO: 36516 - DNA, 120 bp, Homo sapiens
agacgaccagcttaagcctaacaggagagttccagtgcagacaaagagttggtctggaaaacacccctaatcgggagccagttctatgatggtctaaatctatgacactttcactagatt

SEQ ID NO: 36517 - DNA, 120 bp, Homo sapiens
cagcgttcaccaagtcactttatcaggtccagtgtggttctctgctctgtgttcaccccctgggtatcactgccacctatctttatttttctattgcatttgggaggagggacagtgggt

SEQ ID NO: 36518 - DNA, 120 bp, Homo sapiens
aaccgaataggagaaaagtccagctgtctgcactgtgaacctttctcaggccatcagggggctggttggccagatgccagggaatggtggaaggttctgggcctgcatttcctagccaag

SEQ ID NO: 36519 - DNA, 120 bp, Homo sapiens
ctgcggcacagttagccggcccctgacaacaatgtttaaagtgtggccaagggtgaaatattgcctcactggtctgaaaaggcttttgccaccaacaaaaaaccattatgataacaggaa

SEQ ID NO: 36520 - DNA, 120 bp, Homo sapiens
aggcgccgaaagctaagcatagtatagacaggaaagatctctctttctctacccttcacaaaaaagagagaggtttttaaccctccagtgtccggctaatttcctaagtaacactggcca

SEQ ID NO: 36521 - DNA, 120 bp, Homo sapiens
aagcggcctctatgggtgctaggggaaggagtgtgtggagcagagagtaccattggggcctcacaagcaatttttgctttttaagtttcctgttttttcttcattttcatgccaactgca

SEQ ID NO: 36522 - DNA, 120 bp, Homo sapiens
ttgcgttatttggaagaagataatacacataagaaagagaaaatgatagcctgatgagctgccatgagcacaccagaaagccacacaggaggtgctgctgaggtccagggctggaacaga

SEQ ID NO: 36523 - DNA, 120 bp, Homo sapiens
tgccgaggtacacttggtgaaaatcaatgtgacgtgctgggactacatggcaagcaagtggctatgtgcagggctgtcggattagagtcaatggccagagcagcaacgaatgaccccatt

SEQ ID NO: 36524 - DNA, 120 bp, Homo sapiens
agacgttgtgctggagaagccaagtgccaaggaggaaggctggcagaagctctgctcaaaagactgagtgaatgtgtgtgtgtttgtgtgtgtgtgtgtgtgtgtacaacagcccaacaa

SEQ ID NO: 36525 - DNA, 120 bp, Homo sapiens
atacgaagcaatcaacagtagaatccatgcccaaggttgagataagtgaagaaagaaaattgtgccctgatgggtttgagttcaaagtgtgtggtagaaacctgcaccacccatttgggc

SEQ ID NO: 36526 - DNA, 120 bp, Homo sapiens
agccgctcagctgagctggaaaagtgtctgtgggaggatgccaggaaaaacaccatcacccaccctttgaaggagggggatgtgctgaatcttggtaactaggagaacttaaaaccggag

SEQ ID NO: 36527 - DNA, 120 bp, Homo sapiens
cagcgatgagagatttaatttcagccatgcagccagcccagggcccctgtggggaagtagagatatcgcaggaagtggggctggaggggatgctggaggcctctcatttcgtggagataa

SEQ ID NO: 36528 - DNA, 120 bp, Homo sapiens
gggcgctgcctgggagagatgcaggtacccctcaagccataaaatccctcttctggtccccagcaagcactgattctgtggtaggtcacccgaggggactgaacagtcacagatgaaaat

SEQ ID NO: 36529 - DNA, 120 bp, Homo sapiens
tgtcgccctttgtccccaagggcctttgagcgctggctggaaaaggtcctggagcgtctggggttttacagggtaaagagagcagggtctataatttcccaaccctgggggaggagacag

SEQ ID NO: 36530 - DNA, 120 bp, Homo sapiens
agacgatataacttcccgaaaagcacagctggcaagcacacccacaccgttaggctgcaactccctgaactaattaaaaggcagagcaatgggaatttctggattgctgcataagcagct

SEQ ID NO: 36531 - DNA, 120 bp, Homo sapiens
atacgctcgtggtattgcaaacacagagctccctcttcacttccaagagccaagttggacacaggtgattacagtttaggactaaatatgtgggtaggaatgtgtgtgtgtgtgtgtgtg

SEQ ID NO: 36532 - DNA, 120 bp, Homo sapiens
gagcggggtggagaagaactcagccagagagaaatgcaatgtgatggaaatagttaaagaggctatgatcttctctctgattccccttgaggacagaacaataggcaaaggactcaaatt

SEQ ID NO: 36533 - DNA, 120 bp, Homo sapiens
agtttgaagaattactgttcgagtttaaccccacttggagccagaaagatgggccaaatcaacaccaagcatgcttttctgctttgtgaatctatgaaaaggaaaattttttccaactct

SEQ ID NO: 36534 - DNA, 120 bp, Homo sapiens
cagcgagatgcattttgtaggccccagggagaagctcagagacggggaactatgagaaataagcagatcaagaaggagagaaagaagagaaacatttctcagcataaacatgattagttg

SEQ ID NO: 36535 - DNA, 120 bp, Homo sapiens
actcgaatttactcttcagaacagaggcatttgcagtagtgaacttgagctttctctgtggggtctccatatttttggtatcttgagattcctggggattgatgactcagtaaatgctga

SEQ ID NO: 36536 - DNA, 120 bp, Homo sapiens
tggcgctgcagattaggttgtaagaggtggggcttcgcaaagcggggaagcagccctccccagaagaatggggagggaagtcacttttcatccatgtgtgagataccattgcctgattca

SEQ ID NO: 36537 - DNA, 120 bp, Homo sapiens
atgcgctatacaccaacagacacacggagaacatgtttgagccaaaaaatataaatgaggagttctaatgtaattttacagtggtttattaggtagcaaccacacttatctcactgatta

SEQ ID NO: 36538 - DNA, 120 bp, Homo sapiens
tgccgtggtcagggcctgtgctaggtttacaggatctgattcacaccttccctgatccctcagccatgtgtatagtacactctacatacaaaggatgctggggaagaatgtgaatggaac

SEQ ID NO: 36539 - DNA, 120 bp, Homo sapiens
gtacgtattcaggctatccagatatgcaaaaggccagctgctagttggaaaactatactagaaaattccaagagagtgaggactatgctgtcttaatcaccactgtatacccagaatcta

SEQ ID NO: 36540 - DNA, 120 bp, Homo sapiens
tccggctggttctgtgcccatccctctgcccccactgcagagaggccaataaaactcttgttcagactcacactgcacacagtattctgaactcctggatctaccacctcctgcttccca

SEQ ID NO: 36541 - DNA, 120 bp, Homo sapiens
gacgggaagcccatgaccaggaacccagacccccgagagaggttcacgttacctgatatcactggttcttctatggccagaaggatggcaagaaacaggtaaagaagtttcatggctggc

SEQ ID NO: 36542 - DNA, 120 bp, Homo sapiens
cacggcagagatgagctttgcttttatcagcagggctgtgggcagtgaattagaacaggaggggatttatatgaggtcatccaggccaaaggacagtgtgtagcagatgtctcagcaaag

SEQ ID NO: 36543 - DNA, 120 bp, Homo sapiens
agcgctgaggtggccatggaatccccgcatgactgtccgagtggagagcaaggctggagagctgcttcgtcagcccagaagtttcagtccttgttccccaaaaagtggtcactgaggcaa

SEQ ID NO: 36544 - DNA, 120 bp, Homo sapiens
gtcggactgctggccagaacagcagtggcccagggattgggtgctggaggcctagtttttcaccgatgggcctggctttttgcaaaggctgggagggatttggagaggctgagcagctgg

SEQ ID NO: 36545 - DNA, 120 bp, Homo sapiens
ctcgacccctaaaacccccatttggctggatgcagaaagacaggaccctgtccggggggtgcaggcgctgagggcgggcagagggaggctgtgaattaaccacctccgtgggctgttgga

SEQ ID NO: 36546 - DNA, 120 bp, Homo sapiens
aacggaagccagccagagccacctgagcaatagtccagaagataagcagggcgggcagtgaagaagcacagttttgagatggacatttaaagcaccagccatcgcatggagcactgccaa

SEQ ID NO: 36547 - DNA, 120 bp, Homo sapiens
cccgaggctggacctacctttaatcagatccacgatgcgcagctcgaagggaatgtcgttcttcttggcaaagatgtaaacagcgcggcagggctgggacagcaggtccaggtacagctc

SEQ ID NO: 36548 - DNA, 120 bp, Homo sapiens
ccccggccttaagcaattaaggagaaatcattcctgtttcaaaagtaaaatgatgaggctctcaaacagctgtacactgcagaatcagaggggtcatggagtcttgcccagaatacggtc

SEQ ID NO: 36549 - DNA, 120 bp, Homo sapiens
gaacgcaggaactgcctcggctcacacctttctcgctgatcaattcatgccacctgctttgtctgccctctgaaggcggggtttgctcctcgtcaagactgcccaggcgagaaccgcaga

SEQ ID NO: 36550 - DNA, 120 bp, Homo sapiens
gaccggcagaaggaaagaggggagaagggaggggaaagagtgaggtttttctgaaagctcctctcccttcgctgaaaagttctttgaaataaacaacgtgggtgttgtatggtgagccca

SEQ ID NO: 36551 - DNA, 120 bp, Homo sapiens
gagcgttttagtaagacacgctcgttaacaaaaactgaaattaaatagataaccatcacggttatatatttgggtgaagtgatatcagttacttcctgtctaacccaccggggaatctat

SEQ ID NO: 36552 - DNA, 120 bp, Homo sapiens
aggcgcaggaatcaaagtcatttcattctattctctttctctgtcctctagccctcaggagtctgcagatccctgcaaaggctcagagaaggctgagcaggctgagcaagagggtgcctc

SEQ ID NO: 36553 - DNA, 120 bp, Homo sapiens
acacgcagtcccctccttcttccctgggatgcccggccaggaacagctttcagaaaagggaaagggctgagaacagcctcctccaactccagcacccaaggcacgggcagcagccttgct

SEQ ID NO: 36554 - DNA, 120 bp, Homo sapiens
cagcgtgaaaatgcagggcctgggcatttgcgaggaggcccagaaaaggagagaaaacactgctgtcgaacattccaactccttcccacagagcagagctggacacgtcctcacgtccat

SEQ ID NO: 36555 - DNA, 120 bp, Homo sapiens
catcgcagagaggggcggcttccagcaggagaagagagaactcaagtggaagggaactgaaggctgagcactgtgtttgcaggaatgaaaatatattttcttagggaacagacaaaacaa

SEQ ID NO: 36556 - DNA, 120 bp, Homo sapiens
aggcggaatacctaagaggggcattcattgtttggctcctgcctgactgatgacactggggtgtcaatatataacattgtgatgacaattggactttcacccggcaatattccagaacta

SEQ ID NO: 36557 - DNA, 120 bp, Homo sapiens
ccccgaactgcaggcccggtgaaggcagcgcgggcacgtggccctctccgggcatcctcatcggctcctgcagagggccccggaacagcacccccgagccaccaggcggaggagggggcg

SEQ ID NO: 36558 - DNA, 120 bp, Homo sapiens
ggtcgtgcgggccacagtcagcgggcagacccgagccgcccatcctacggggcagcaggtctccgggcggcggatgcggacctgagaaccacgcgctctcttgcgccaagtgcggcgcct

SEQ ID NO: 36559 - DNA, 120 bp, Homo sapiens
gctcgaaggtgcccagacgcccggcgcccgtgctgccgccttcgcgctcaaagttcggctgggccaagccgcccaccgggccgccatgcaccaggccgccctggcccacgtccccggggt

SEQ ID NO: 36560 - DNA, 120 bp, Homo sapiens
tggcgcagccgctgctgctgattccgcgacgccatctgcttaatcatgagggccgcgttttggcgctgctgctgctgctgctgttgctgttgctgttgctgctgctgctgctgctgttgc

SEQ ID NO: 36561 - DNA, 120 bp, Homo sapiens
gtccggggccggatgctgcaggggcggccccgaagggaagctgtcgggcacaggcggtgtgaactcgccgggtaggcctgggtaggcggaaggggagaggtgattatccagagcgccgtt

SEQ ID NO: 36562 - DNA, 120 bp, Homo sapiens
tgccgttccacgaagcgcagcggtccactcccgcgctgcccggaaagtcgaagcgcggcctcttggccacgttcatgtaggggggcgcgtcgaaatgctgcagccgctggttgggcgcct

SEQ ID NO: 36563 - DNA, 120 bp, Homo sapiens
ctgcggaggaggatgctgcatgctgaaaacaggctcggaataagggtgcatgctccggttctccagccggtggatgggatactcgaattgcgcgtgctggctgggcagcatggggcctcc

SEQ ID NO: 36564 - DNA, 120 bp, Homo sapiens
ctccgtcctgcaggccgccgctgggcgtgcccgcctcgccctgctggggccgagggagcgcaggcgggcacgaattttgtcggactagaagcccgggtggcggcggcggctgctgctgtg

SEQ ID NO: 36565 - DNA, 120 bp, Homo sapiens
tggcggctgctgcgggggctgctgctgagggggtggcggggcctgctggggaggctgcattaacgggtgcctggagcccactgagggctccagacccacaggcatctttctggccccact

SEQ ID NO: 36566 - DNA, 120 bp, Homo sapiens
ctgcggtggctgggcgtgcattttggacaagcccaccatgcccgcagctctgggcatggccgaggcgcccgggaaagcgcccccaggaacctggcgacccgctgcataatgaggcagctg

SEQ ID NO: 36567 - DNA, 120 bp, Homo sapiens
cttcggagtcagagggcgaaaacatgtcaaaatgtcccgagggcgcctcgcccgggtaattgtattccagcgagtcgacggctccttggttcgtcaccctccgtggctccagactgtggg

SEQ ID NO: 36568 - DNA, 120 bp, Homo sapiens
aatcggagccgctggaggacggcaggccgtggaaggaggcggctcggttagggctctggtccagcggcaggcatggggccggcacggcgtggctggaggcacctgaactgtggaagtccg

SEQ ID NO: 36569 - DNA, 120 bp, Homo sapiens
ccccggtcgctgcgggccgaagctctcaggcccctggctctccgccatgtgctcatagccctcggcgaagggcggctggctgcccaggcctccggctgcgccgccgtagccgagcaggcg

SEQ ID NO: 36570 - DNA, 120 bp, Homo sapiens
ccccgtgcaggcacgaggccccggggtccgggccaccgaagttgcccccaaagtgggggtgatgctggtggggatgatgacttcccgggtggccgtggtgaggctgctggccgccaaaga

SEQ ID NO: 36571 - DNA, 120 bp, Homo sapiens
agccgtgcacaggctgcgcttgcagcccccctgcgtgcaactccgagtggccgcgcgcgtggaagccgtagggctccatgttcatgcccaagatcgggggttcgcccagcgcgctcatag

SEQ ID NO: 36572 - DNA, 120 bp, Homo sapiens
agccggggccttaaagtgggtgttcatgctcagtccggtctcgttaaagttcctctcgccctggccagcgttcctgctgttgacctggggctcgaattggtccagcccaaacatacttgg

SEQ ID NO: 36573 - DNA, 120 bp, Homo sapiens
tggcggggggcagagggggatcaatagggcatgacagccggctctccgcggcgcgcctccggccagctactcgttccagcccaggattgggcgctccgggacgctcagcaccgcgggggc

SEQ ID NO: 36574 - DNA, 120 bp, Homo sapiens
cagcgcgcacctccaccccgcctgatgtgagggacggggggcggggtattagctcctctcctgaagctccgattctgcccggggagggcctctcacatcttgcgaggccgcggggcctct

SEQ ID NO: 36575 - DNA, 120 bp, Homo sapiens
agccgtgttggggggcccatgccccgggcggttgtcacagccgcgggtgggtctgcggggaggggacgaagccgcggatgaacggagacaaaaagttaagtggggggaatggggagggaa

SEQ ID NO: 36576 - DNA, 120 bp, Homo sapiens
gagcgatcaccttctcaagtccgattgggtctgctggggagccctcaggacgccgcccgcagcctcccggagtccgtggcagagctgctaagggcaggggagggagacccttcaaagccg

SEQ ID NO: 36577 - DNA, 120 bp, Homo sapiens
ccgcggctggcgccgggcaccgacagagcggtccctccccccgccccccggagtccccgcgccccgcagcccgagcctccaccgagcacgatccgctcgcacaatccccgtaggctccgg

SEQ ID NO: 36578 - DNA, 120 bp, Homo sapiens
gggcgagcggctgctgcttcttcagcgggtcggaggactggaggctccgctcggcatcgccggtgccggcccccgagccgaggacgcagaggggctgcgaggcggcaggcgccgggggct

SEQ ID NO: 36579 - DNA, 120 bp, Homo sapiens
aggctccgctcggcatcgccggtgccggcccccgagccgaggacgcagaggggctgcgaggcggcaggcgccgggggctggagccgagggtcggggaaaggcgcggctcctctgctcggc

SEQ ID NO: 36580 - DNA, 120 bp, Homo sapiens
atccggctgaagaaccagttctgaagagacctgctacggcttaatgtttccaaatcagaaaacataaccccaagtgacactggcagggttcctgggaagcactccgggttggcaggagat

SEQ ID NO: 36581 - DNA, 120 bp, Homo sapiens
cagcgggacaacttttaacctgttctccagcactccctctccctcccaatcatgcaaagtcccaaatcctaacattggcagtaagtctaacttgaaaacattccttctgtatccacagaa

SEQ ID NO: 36582 - DNA, 120 bp, Homo sapiens
cctcgcaacattctatggctctcacatgagagctgagggtctaagaacaaagaacattctctttccaaatgagcaagaacaggaaatcccacacggtgcccttgtcaactaagctgctga

SEQ ID NO: 36583 - DNA, 120 bp, Homo sapiens
ccccgctgtgctaaaggatatagtgtctcaagtgaagctgaccaccttacagctgggcatcatggcctccaattagagacaaagagtccaagagtcagccaggaaccaggagggccctgg

SEQ ID NO: 36584 - DNA, 120 bp, Homo sapiens
ccccgcactgcccaaggactggcaccctaggcttcttgggtcccagctgccaggctgccttggtgacttttgctttctcatctatacaatgaggatggtgtctaagatctctctcaacca

SEQ ID NO: 36585 - DNA, 120 bp, Homo sapiens
acccgagtgcccgctgtatccacgctcagatggccaagtgcatgaatgacagtgtcgccataaacgcaaacacaatgtctcaaacacaacactaagaaacttacctcagaaaacaaacca

SEQ ID NO: 36586 - DNA, 120 bp, Homo sapiens
atccgaccatacagctggctacctctccttatgttcagcagttctacaatatgagccagaaccacaagaatatggttgtgacacgcacaaaaagagcagactggaaaggactaaatccta

SEQ ID NO: 36587 - DNA, 120 bp, Homo sapiens
gagccagaaccacaagaatatggttgtgacacgcacaaaaagagcagactggaaaggactaaatcctaaaaggagaggtgaaaggtgaccacgcaccaaaaagccctaatcttcaaacaa

SEQ ID NO: 36588 - DNA, 120 bp, Homo sapiens
taacgctttgcaaagacacagcagtttctgtaaggctcataactgtcttcatattttcatttttcaattttaggcaatgtgaatgcttaatttcagctgctgattctgtgatgttaagtt

SEQ ID NO: 36589 - DNA, 120 bp, Homo sapiens
ttacgaaatatatgtgacgtctatgtactgaaatttcaagcagaaccccattccccaactcagctattctctctatttaggtaacctaaactttatttaggtaaccatttattttagtag

SEQ ID NO: 36590 - DNA, 120 bp, Homo sapiens
taccgtttaaaattcagtgtgaacaacaggagatggaggaggtggggggaaggaagacagggggaatacataaaccaccaccctgacccaagacacactgggagccatgagaaggtcatc

SEQ ID NO: 36591 - DNA, 120 bp, Homo sapiens
catcggcaagactctagtggcattcaaaggtggggaagtcccatctggtggggtaaatggaaaatattaaatggaagaagtaaacatgagattaaatgtgagtttaaaaagactgaacta

SEQ ID NO: 36592 - DNA, 120 bp, Homo sapiens
aggcgaaataagatccagacaggaaagcttactgcctgtgagaggataatcagtcacattttccatgttcctccaaacttaattttttgtatggctcacacccattttactaaagaggac

SEQ ID NO: 36593 - DNA, 120 bp, Homo sapiens
attcgtctgtgcctgaatccttcaactctgtctgagaacagagacattccatagccaagataaggttagaattaatcagtttcactctttgggcacttagcttcttaaagacatggaaca

SEQ ID NO: 36594 - DNA, 120 bp, Homo sapiens
aggcgtgagcaatcgcgcccagcctcgtttgacaaaatctaactttcatgtttgataaaaattattagcaaactagaaatagaagggaattgccttaacataatagaggcatcttcaaaa

SEQ ID NO: 36595 - DNA, 120 bp, Homo sapiens
gttcggcaggactgagcttttgtcagccttgggctaattactgcccactactgaggcaagactgttgtttacttcacccagtgcctcatggaacatgagtctggctgctggtgggaacag

SEQ ID NO: 36596 - DNA, 120 bp, Homo sapiens
cctcgggtagtttcctcatgtacatgtatagatcacgagtgactctgctgacctctcaaggtctctctccgggcagctccctcctctctggcattctgcccttcatataagtcacttagt

SEQ ID NO: 36597 - DNA, 120 bp, Homo sapiens
ctccgggaatcctctggactccaaaaggtttccctcctgtgccaggtcttggaaactatccaggcagtaagctagggcagttggagagctcacttcacatgtttcccatctctcagggtt

SEQ ID NO: 36598 - DNA, 120 bp, Homo sapiens
tgtcgttccatgtattttgtgtgttctctgagttcaggcaagacagtaaatgtggtcactgttactccacgttggctggaagcacgtgatttttctctttacaaatctgacgaggtaatt

SEQ ID NO: 36599 - DNA, 120 bp, Homo sapiens
gctcgtgacaaatgtccaggactcagggcactgctggcaccagcaggatttggctgcgggaagtcttcttcacaagaacttagtccctggtttgtggtctcaagatttttggagacaatc

SEQ ID NO: 36600 - DNA, 120 bp, Homo sapiens
agccgccttagtagttaaaaaataataataatgattaaaaatagtaacagagcaacattaagggctctggtcctttgtgtgggaggagtcagttgacagttccttgatgtctgggacagc

SEQ ID NO: 36601 - DNA, 120 bp, Homo sapiens
ggccgagtctctgagcacagagaatggatgccacttgtggctggtgtggactcagagctcgccagcaagaagagtgccacgctctgccgccaacatcatccctcctcaggggtgccttgg

SEQ ID NO: 36602 - DNA, 120 bp, Homo sapiens
gcacgctgggggagcagctgtgtgtttgataatggaacacagtctgataaaaaaaccctagtgtaagtaactcagttactgtcttcctttgccctttcaatacttgactcattttatttt

SEQ ID NO: 36603 - DNA, 120 bp, Homo sapiens
aaacgtaaggtattccttaaatctggttccttgattatagcagctgctggctctggacgaagggcccaactgaaaactgaggggtgatttgggatctgagtggacgagtggctttgccta

SEQ ID NO: 36604 - DNA, 120 bp, Homo sapiens
ggacgctggagagaactcggaggcagccttgtgccttggggtggtggggacaggactggcccagatcagtccagggcaagaagcagggaagtccaggtcagagacatgggttactatcct

SEQ ID NO: 36605 - DNA, 120 bp, Homo sapiens
aaccgggccctcctcaaagataagcggacatgctcaccccatcctgacagcaaaggacagcgtggttccaggaaagagccacgacagtgtttcccttaggccaaattaaatcacatactg

SEQ ID NO: 36606 - DNA, 120 bp, Homo sapiens
ctgcggctaaacaaaggcagttgttcaaataattatatgccccatgtgaagaggctaatcgttttagtcttgaagtgtcagtgattcacagtcttggacttttggctttgatgtgcattc

SEQ ID NO: 36607 - DNA, 120 bp, Homo sapiens
cagcggcagctctggagccggctagcggtgttatatcgccctcttgtggcctctggagcagtgcgtgggtgcttgcagccagaagcaggagaatgatccaggccttcccctccacctggg

SEQ ID NO: 36608 - DNA, 120 bp, Homo sapiens
cagcgcaggtgacgggtgccaaaccctcccgagatgacggggtcactgaggctgacctgccacaattcggcatggcccaccggcctcgggtgctggcctccatcaccaccattagcagtc

SEQ ID NO: 36609 - DNA, 120 bp, Homo sapiens
gctcgaagttgctcagacaagattctaggatgagaggtggggaggtggggaagcattcattcccagtagggtgtgggcgcaaggtgcaaagaagccctctgggaagggcacagccacggc

SEQ ID NO: 36610 - DNA, 120 bp, Homo sapiens
ccccgaggcgtctgctaggtgggaaagggcacatccacggccacatccccgaggcatctgctaggtgggaaagggcagcctcgtcctcacactgatgcacggcccctactgacaactgct

SEQ ID NO: 36611 - DNA, 120 bp, Homo sapiens
ctgcgcctccctgagccgcaccatcactctgttgggcaggctgggaagggagcatcatttcattttgtacatgaggtcactgaggctgaatgtacccggcttgtagggagcagagctagg

SEQ ID NO: 36612 - DNA, 120 bp, Homo sapiens
gagcggacttgtgttctggaaagcctccggttgtctcgggagcccattttggtgtctaagagggatacatgtgggcgctgactggtaagcgatgtgttctgatgcggaggagccttgtgc

SEQ ID NO: 36613 - DNA, 120 bp, Homo sapiens
gggcgcgatgagcaggtcatacagggcacggagcgggggcttggcaaacgagctctgcctcctgggaagagaggaggtcccgtcctgggtcggtgacacagtgttactgaacaggctcgt

SEQ ID NO: 36614 - DNA, 120 bp, Homo sapiens
ggccgagggatcaatcagggccactcagacaggcaaagactcaccctggccctccaagccatgcccctgtatggaaggcaggctgaggcttcacagcagcaaccccgccagcctccctcc

SEQ ID NO: 36615 - DNA, 120 bp, Homo sapiens
ctccgttcccttctcttccctttcaggtaattttcacactacagtgagcactgtcagaaaccgcagggtaaaccagctgcacacaacagcttacatttctatggagtttttctacataat

SEQ ID NO: 36616 - DNA, 120 bp, Homo sapiens
aaacgtgaggaccattaggaatcagcgacagccaccaagctgatgaggacagtgccccaatgccaattaaggtaccaagggggctgcaaacaggacaaagagcatgttggcccccacctt

SEQ ID NO: 36617 - DNA, 120 bp, Homo sapiens
gcacgggctctgtggcaaggcagtagaaacccctggccccatggcctcattgggaagatgctatgaccaggcagcagctgcagagtgggtcggtttgagtatggctgtatagttttgttt

SEQ ID NO: 36618 - DNA, 120 bp, Homo sapiens
tttcgcttttaaatttctgttccaatgtttccaggcatagttttattaatacagaagcattttcaaccccaaggaccccaagcttcatacttccaacatgggatgagagcattcactgat

SEQ ID NO: 36619 - DNA, 120 bp, Homo sapiens
agcagaagagatacaggaaggggaaatgagtccatttccaatgcagcaacaaggctgcccacgtgcatcctctcagcacctgccctgtggcctggccactgtggccgcagcacagccatc

SEQ ID NO: 36620 - DNA, 120 bp, Homo sapiens
caacgtggcagcagctctggctctcccagaacccctccactctgccactggctgcacactccataacatgcggttgaggtccctgcccagcagacagcctcctgggtggggaaccagtaa

SEQ ID NO: 36621 - DNA, 120 bp, Homo sapiens
acccgtgccacgttaaatgtgggcacgctgagcactgtggccggcccactcccacctagcatcctccctactttcttttctccctgttctatagtcatggaggctgggcccatgggatgg

SEQ ID NO: 36622 - DNA, 120 bp, Homo sapiens
ttgcgccaatggtggcttacagaagtcaggaaacttctctgggatactggccctaaatgactctggatgggtgcaccttacttaataccaacgcagtccctgtagtccaggatccaggat

SEQ ID NO: 36623 - DNA, 120 bp, Homo sapiens
cttcgtcttttctacagcaaatgtgatctgctgactgacccaggtccagtcacatacacacatatcatatatacataccacacacaaacacacacacacaaatacaaccctgcacataca

SEQ ID NO: 36624 - DNA, 120 bp, Homo sapiens
ctccgcgtcactcccaaagggtagggctgctgctctgccctctggggctcacaccaaggtcagggtgctggccaagagaagggtctttgtttttcattcaatagcagtgcctaccctggg

SEQ ID NO: 36625 - DNA, 120 bp, Homo sapiens
tgccgagacctcaaaaatgacagcagaacaaagagcaattcctgaagtggcaagggagaaaaacctaaagccaagtctcacttgactcgcattagctacagaggcctcattgccaaatca

SEQ ID NO: 36626 - DNA, 120 bp, Homo sapiens
ccccggagagggaagcccttactgctccagtacacaaggccctacacacatggttgcttccatatcacctctgttggctccaggctacaaggactctgcaaacgctagccactatcagca

SEQ ID NO: 36627 - DNA, 120 bp, Homo sapiens
agccgctctgttcagtcacaagccagtgcactcttagcccagatccctggccatacatgggacagagagggaggcctgggaccccacagcagggcagggacaggctggcagggaagctgc

SEQ ID NO: 36628 - DNA, 120 bp, Homo sapiens
ctgcgaggcatgttttggcacctgttcatgggcagatctccctcctctctggcctatgtgtgctcagctataagacatgaggctgcactgaaagtgccagggaagtttgcactgttctag

SEQ ID NO: 36629 - DNA, 120 bp, Homo sapiens
aggcgccagagaacacgcagtgttgcaaactttcctgggccttaagggcttaccacattgaagcgagaagaacgccggctatttccctcatccaaagggtcggggttggaagagtctgca

SEQ ID NO: 36630 - DNA, 120 bp, Homo sapiens
ctccggggctgtgggccttgctgctccccactcagtccccagggctgggcacaatactcagcctggctgggggcggagattgtgttgtataagtgaaccaacaaattaatctacagcatt

SEQ ID NO: 36631 - DNA, 120 bp, Homo sapiens
agacgtctcatcccttccaaagtttctccacccatgttaagaatttaagtttagcactattcttcccactttactccaaacaacagaaacccaccagttgttcagtgccttccacacatt

SEQ ID NO: 36632 - DNA, 120 bp, Homo sapiens
agtcggtcagtgtgttatttatacattggctcctttattcccacattacaggaaccctgcagggtaagaagccatccccatttcacagatgacgagactgaggctgacagaggtgaaact

SEQ ID NO: 36633 - DNA, 120 bp, Homo sapiens
gcctgcatcacctggtggaggtaagtgtcacctgccttcactggctgagaagttggcagagcaagaacatgtgtccaggcccaatcccaggcctccgcaaacctggttgcatccctacat

SEQ ID NO: 36634 - DNA, 120 bp, Homo sapiens
agtcgggatgataatggctacccagggttcaatgatttgtgaaagaaactgcctgctggttatggcaaaatgatctgatctccagccagcttccctatgcactctactgttctcctgtcc

SEQ ID NO: 36635 - DNA, 120 bp, Homo sapiens
ggccgaactgggaatttttcatcctccctgtgtctctactgtcccagccactgccagcctggggaattctgaatggaacatgacacactcttggcagcctttctctttgttgaggcaact

SEQ ID NO: 36636 - DNA, 120 bp, Homo sapiens
aagcggccccagagctgccagcagagtgactgcacatgctgaggagataatctgcagatcctccttccctttcgagaccacagcttgattttccagggccgtcagtcagatgaagactta

SEQ ID NO: 36637 - DNA, 120 bp, Homo sapiens
gggcgtgctaggtgacaacgtgctgcagggaggggaattaaatgaagattagtggggcagaagatcctcacaaagccgagttctcacgagggtgtgtggagaaaggacacatggttatga

SEQ ID NO: 36638 - DNA, 120 bp, Homo sapiens
catcgtcacagcaggtctccacctatgggtcaagaatggtcactgccatgggaataataatagctacttcaaagggctgttgtgagggccaatgcgatcatgctcagcagaggctggcct

SEQ ID NO: 36639 - DNA, 120 bp, Homo sapiens
ggccgggccactgggagagacttggtgggaagcccagagcagagtgaaaaatatgctgggcctgcctggccaagccccgccattagtcactgtttggaaaagtcagagtgtgcctggttt

SEQ ID NO: 36640 - DNA, 120 bp, Homo sapiens
gtgcgctttcctgattcaggcccaatccagtcttcctatgccagccacagagcagtcccatactcccttctgctcaatcctaccctgcctcttctgcctgtgagtatcctattcacttgg

SEQ ID NO: 36641 - DNA, 120 bp, Homo sapiens
ccacgttcaggtatgtatttcccactcgtgagaagttaggcatggcaagtgacttgctttatccagtgaaaagtaatgagaaatgattgtgttacttccagacagaagcgttgaagagct

SEQ ID NO: 36642 - DNA, 120 bp, Homo sapiens
agacggagctaaggcaggcttagattagtgtgttgcccctaaggattgcatggacctgtggtaggctttgtatgaatataatactttgttgtattaagccactaagatttatgggctgtt

SEQ ID NO: 36643 - DNA, 120 bp, Homo sapiens
gcctacaattacaaatcatattctaacaaagtctgtgtgagacagacgtctattaacagaagtttcccaaggagcttttgagccatccatgcctctggatgctctaaattctagccctgg

SEQ ID NO: 36644 - DNA, 120 bp, Homo sapiens
aaacgaataaaagaccctaaaatgcatgcatttttcattacgtctcactgaaagggaacagtaagaaagcggatacatatatacactgcattatgtcataattctttcatgatctgggtg

SEQ ID NO: 36645 - DNA, 120 bp, Homo sapiens
tcacgacaagtccaagaatttggttagattatttttgccatataaaggaccatttaataccaaaacaaacctcccacatcaaacagttaattccacaaccacgaaacctcttctgactca

SEQ ID NO: 36646 - DNA, 120 bp, Homo sapiens
tctcgtttcatctgggtttatgtgagacttaacattcactattcttactagacattctccctgggaaggtaaaacttttttaaaaagtaatgcctccaaggtacatcgtgaaggcagaca

SEQ ID NO: 36647 - DNA, 120 bp, Homo sapiens
ttccgagttctaagtcacaaatcgaatactcaacaattccgcctagaatagaggagtaaccatgtctgtgggagggggaagggttgggaagagatctgttcttcttcctgatacccatga

SEQ ID NO: 36648 - DNA, 120 bp, Homo sapiens
aatcgtgctctgaaatgacttgtaaaccacagacacaaatatttgggccaagaatgtggaatccattgctgtcacattccattatttctggtggagcaattcactaacattttggaatct

SEQ ID NO: 36649 - DNA, 120 bp, Homo sapiens
aatcggaaaaccatcaggcaagccaaaaatgatacaataggcatactgtcattcataaacatcaccaccaccatgagagtccccagaataaaattagctttttgaagaatgcctgaatgt

SEQ ID NO: 36650 - DNA, 120 bp, Homo sapiens
ggtcgcattttctgttgggacatatcataaatgtcagagggagaaagagatctgtgtcacatgtgaactgaagcaggtccctttccctctctgtggaaactgacttaatggcagagctgg

SEQ ID NO: 36651 - DNA, 120 bp, Homo sapiens
attactttgtgaacggaagaatgacagaatgaatggataggtgagtaaatgaataaatggacaaatgaataaagaagtaacagaaccattccctgtggtttgatgcttacagtcagaaaa

SEQ ID NO: 36652 - DNA, 120 bp, Homo sapiens
ttccgcctgctatacacccacttcttgcaatattgatgggagctctgtgtatatgcctgggttcacctagctgctgctctttaatgagcattgatgcagctgaagcctgacacagagggc

SEQ ID NO: 36653 - DNA, 120 bp, Homo sapiens
acacgacccgaaggtgattttaagtccctatccttttgctgacaagaaaaacatgtcttggcacttggtaccttaatgtctaaagctacagtaaaagtatttcctctttaaaattcattc

SEQ ID NO: 36654 - DNA, 120 bp, Homo sapiens
gggcgagggagaaaagggctattcatcatcctcagacatgcacaacagtatcagtcaattctcttctatggtgaaagattttaagttgaaatgaatctttcaaatccaattgttcatact

SEQ ID NO: 36655 - DNA, 120 bp, Homo sapiens
agccgatctgtacaagcccttttcagccttttaatatggatattaaaccctagaaatgggaacaaattatgcacacatcttttcattttagtttaaaatatgcacagatccatgttttaa

SEQ ID NO: 36656 - DNA, 120 bp, Homo sapiens
agacgctctcagcatgacactgaacacaacagttgtgttccatggagaggggcggccagagccagcatgttgtgcagcatcctggcttgtctgcttgctctttggtccttccttctttcc

SEQ ID NO: 36657 - DNA, 120 bp, Homo sapiens
aaacgtttacaggaagctactataatgatttcagcttctataatctattttgatgagcttcaaacatctgtgttttagaacttaattatctgaactagatttgatctgtttttgcatccc

SEQ ID NO: 36658 - DNA, 120 bp, Homo sapiens
acacgggctttggattttggcgggaaaatcccacgagactgactaatatttgtacagactaacagtttataaaacactttatatgttatttcttttcatcctctatagcaatgattctca

SEQ ID NO: 36659 - DNA, 120 bp, Homo sapiens
tcacgacttgtggtaggagagttgctactggcaactagtgggcagaggtcagtgatgccgctaatcatcctacgatgcacagaacagacccccacaataacggaggacccaggaccacat

SEQ ID NO: 36660 - DNA, 120 bp, Homo sapiens
ggccgctctgttctcaaacccctagtgagtaggttatatgaccacccttcccttcatggctcttaataccttgatggaccccagaacccaagtaagccagtcaaataacctctcaagaat

SEQ ID NO: 36661 - DNA, 120 bp, Homo sapiens
aggcgatcacttttcattgcatattattctcattcatgtcatgttactcagctttctttgttccctttctgcactgaaatagagaagcatcactctacctaaggtcttggctacatccaa

SEQ ID NO: 36662 - DNA, 120 bp, Homo sapiens
atccggtgctcttctctgtatttccaagagaccagtaagcactgctcagggcagagaaaacagaacctctcagtttgaggctgcaggtgccaatcttcagtgcggcttctaagacaacca

SEQ ID NO: 36663 - DNA, 120 bp, Homo sapiens
acacgaccacaaagggactcttgtccagtttcattttctgaagctgctgataagtgggctcgagggagtctgaaaataaacaacaataacagcaacataacaggagaatgtaggatgata

SEQ ID NO: 36664 - DNA, 120 bp, Homo sapiens
atacgctctagaaataaatgtttatcatatcttttgtggcttatttcaagtataaactcttcaacctttattctagcaccacttatctcatatgactagcatcacaaaccccagtccagt

SEQ ID NO: 36665 - DNA, 120 bp, Homo sapiens
ctcctctggcatacattaatctgtgtatccaaacttgtgctgcattttaatggtattgcacagtttggtcattaactattttagaattgttctacacgtattaattttttaaatattttt

SEQ ID NO: 36666 - DNA, 120 bp, Homo sapiens
tcaagtaaatattttggcaacccaacaaaggtaagaaaagaagcatgcacctaacgggcttctcgaattacaggcttgtccaaacactgccttcctcaagagacgctggtcagggacaaa

SEQ ID NO: 36667 - DNA, 120 bp, Homo sapiens
tctgcatttgattacaggcctgattgccaaggccaactttgaaaaggtaagaggaccagagggccaacctgctgtttttttaactctggcaggccaagcgagcagtacagcggggagcta

SEQ ID NO: 36668 - DNA, 120 bp, Homo sapiens
accagtctgcaggagtaggaaaacccgcctctgggttctccacccaaagtcacagactgatgttggaaaggatgggattttgctggtgtaagaaaactcagagttgctttgtttactcat

SEQ ID NO: 36669 - DNA, 120 bp, Homo sapiens
tttatttttgagacggagtttcgctcttgttacgcctggcccagtggagtctttattaagtgaattttgttttactgtttaaaaattacaccattggagtattcactatagaggaaataa

SEQ ID NO: 36670 - DNA, 120 bp, Homo sapiens
ctcaaatgggagcagagggaaatctgaactgctcttgacctgcagagcatggatcagaacttactgttaaaagaacaactcggaggtaattggatttgcccctgaaactgcttttgccag

SEQ ID NO: 36671 - DNA, 120 bp, Homo sapiens
tcaaagctggttgcttgttgtttatttgtacctcaggagtggaaatactggctgagatgaaagtacctggcacaaatcgcttttccttcttggtgtttcacagccagatgttgcgaaatt

SEQ ID NO: 36672 - DNA, 120 bp, Homo sapiens
tggcttctaggccctgaagggaggggtcagtcatctggattggaccttattttgtagcattagttgaacatttatcattgacaggagcctgtgctattcactttacatgcgttgtctccc

SEQ ID NO: 36673 - DNA, 120 bp, Homo sapiens
gcagaagtggggtgtggaggaaagtcagagggaaatctgcttcagaaaggaagggtctttagacacaaagactggaggcccttccccgcccgcacgggagctgccatcgtgggtctcatg

SEQ ID NO: 36674 - DNA, 120 bp, Homo sapiens
gggtgtggggcccatgtctgggcctgagcccctcagtcccggaacaggaatgaacaatagctgttagcgctgtgctaagggatttgagtgaagcttcccccgctggaggaaattctgctg

SEQ ID NO: 36675 - DNA, 120 bp, Homo sapiens
tatttaaaattgtatacccctcccccataatccccaccacttcctaaccctctttgccctttttcccttcaaagtacttattacctattacctacacactataaaatatacttacgttgt

SEQ ID NO: 36676 - DNA, 120 bp, Homo sapiens
ccaagtctgcccctcccccaactccttgcagccctgagtcagctagattgcgctgccctgaggctgtgcccagcagctgcagggtgaccttgaccaacacttgccctctctggttttcat

SEQ ID NO: 36677 - DNA, 120 bp, Homo sapiens
aattaaaaagctttttgtcctattgtcagactgggaaatggatgtgcccattactcagccttaaaaacgaggaaggagatcatctgttaaaaataaaactcatcattttcttttattctt

SEQ ID NO: 36678 - DNA, 120 bp, Homo sapiens
tgggccacactgtgcacatgagctcttccctgagcctgtgagtacctgggctgtaaaaacccaactgcagacgccagggaggcacgggagtgacctaattttctcttatcaggcataagg

SEQ ID NO: 36679 - DNA, 120 bp, Homo sapiens
gagggagctgggcagcccgggatggaatgctgcagacagtacgtgcctgccgcagaaatccagggggcggtcagtctgagcggaaaggaggaccaggcagggaggtgggaagcacagagt

SEQ ID NO: 36680 - DNA, 120 bp, Homo sapiens
gccggcctctgttccctgaactaatgtggcctggaactgtctgggggacttggcttcagtttacaaaggataagcttcaatcctcctgcaggcacttggcaagaagtttcaaagctttgc

SEQ ID NO: 36681 - DNA, 120 bp, Homo sapiens
accgggagcagtggagcgcagccctcagccagaggcaggaggaaatgtggaggggagagcctggagaggctgtcccagtcagagggagagagcagggcccgagatgcttccaggaagcaa

SEQ ID NO: 36682 - DNA, 120 bp, Homo sapiens
ggcgactcacggaccctgagccactgcatggcctctggctccttggcccatgtctgcaatactaacttgttgctggcccagacccccaggcccagcagaggagggagagaggaggggatg

SEQ ID NO: 36683 - DNA, 120 bp, Homo sapiens
accggggagatttcagccacccacgcccgctggccttggctcctgcagggagttggagagaagaatgtgctcagtgctcaggggagccgaggctgccagccagtagccagagcagctcgt

SEQ ID NO: 36684 - DNA, 120 bp, Homo sapiens
cccgggagtccacagtccagccctgcagtcgggcacaccggccgcagcacggaccactggggaggccgggtgggggtcattagtcctgggattggttacatctggagagccccaggcagg

SEQ ID NO: 36685 - DNA, 120 bp, Homo sapiens
cgcgccagtccattcagaagtatatcaagagccactacaaggtgggtgagaacgctgactcgcagatcaagttgtccatcaagcgcctggtcaccaccggtgtcctcaagcagaccaaag

SEQ ID NO: 36686 - DNA, 120 bp, Homo sapiens
cccgaaactgtcactggagctcccaagcacatgagacaggggtgactttaagagatctttgggctggtggcacggtacagtgtggcccatgttatgactcactccacaaatatttactga

SEQ ID NO: 36687 - DNA, 120 bp, Homo sapiens
ctcgggcagttcaccgccctctcgggcctcagtttcccgccctggcagacctcgaggcggcctcggagatcccgggcctggcgaatactgggcggggaggggcgttaactccagcctccc

SEQ ID NO: 36688 - DNA, 120 bp, Homo sapiens
tgcgcttggagacattggagagcccacattgaaaatctcttcagttaaccacatttaagtcccttcagtccaaagaggaaatggccactggagtctgctttagttcccacaagctttggg

SEQ ID NO: 36689 - DNA, 120 bp, Homo sapiens
atcgctttttgcacaaatcacagcctaagtgacagcagataacattttcttcccctctagcaccaccttccccagggtgcctccctggggctcacatgtgttctcacagtgcaggctgaa

SEQ ID NO: 36690 - DNA, 120 bp, Homo sapiens
cacgtgagtcgcttggggaagtctgcctgagaggggtggcatggcccggcactggggagactgaggcacaggcataaactctgccctgggaagcggcaagttgagagccggagaatcaca

SEQ ID NO: 36691 - DNA, 120 bp, Homo sapiens
accgttgaggcttcttagtccttccctcccacttcctgatctccgcggaagcccctgcctagcgtctccccatggcccttggtacatcctccccttctccacccgcacctccgtcttccc

SEQ ID NO: 36692 - DNA, 120 bp, Homo sapiens
agcgtcttggcagttctcagcaccttgacatcacttccttgctaccactcagagcggcagtgacacagttcccttatctcagaaggccagaagacggctgtcaaaggtcacagggaaatc

SEQ ID NO: 36693 - DNA, 120 bp, Homo sapiens
ttcgcattagggaaaactgctgccttctcaggtctgagggcaatacaaaaggtgcccccaaaatgctcttggctaaatattcttgatgcttggaaggggtgagggaagacacagcaagaa

SEQ ID NO: 36694 - DNA, 120 bp, Homo sapiens
cccgaagcctgagttcctgtatcttacaggctttgcttatgaaaatcagccagggtgattacgtcttcctggcatttgaagtcaggaagactgtttgatgttaaagggtttacaggaaag

SEQ ID NO: 36695 - DNA, 120 bp, Homo sapiens
tacgtaacacacatggagaagctgaggttcacagatagcgagtgatgggccacagtgtgaatcagagattcagacccagctctgggaggctcaggccccttccaccctcctcaacctggt

SEQ ID NO: 36696 - DNA, 120 bp, Homo sapiens
ttcgctcggtggtggtgagcaggaaggcaccggtgtcccgggggcagctctcgccgtcagccggcagcacggacacacagtcagccaggcggatgacccgtcgctcccctcgccggccag

SEQ ID NO: 36697 - DNA, 120 bp, Homo sapiens
cccgtctggagttggcaggaggccaattactgggactatgtacaatgcagttttcacaaggacattttgtgctggattaaggacactggtttgtctagagatttttgggtcttccaaaca

SEQ ID NO: 36698 - DNA, 120 bp, Homo sapiens
accggcctcctctggctgctgagcccgtactctctctttggctcaggctaggcctcttcttctccttggacttaacgtggcttaggtccctgagtcggccaagacctcccagaggagacc

SEQ ID NO: 36699 - DNA, 120 bp, Homo sapiens
agcgggagtaccgctcagggctttcgtacaggagctgctccacctgaggaaagacatcggaccgtcagagccggggactaccctcagcccagggagacacctgtgtttccagggctggga

SEQ ID NO: 36700 - DNA, 120 bp, Homo sapiens
cacggggtagaccgcaggttaacacctctcagactccttgaaaaatagctggtgacgggtcagtgcccagagctcacctgcctttcgccaaactctaaacacccctgtgtgtttccccta

SEQ ID NO: 36701 - DNA, 120 bp, Homo sapiens
atcgctcagccagcaggaaacctttaacccaatacccagaaaaacagacatttggaggaagagggatcttccagattattcttccattctgccccatcctctacagagaaggaaactaag

SEQ ID NO: 36702 - DNA, 120 bp, Homo sapiens
agcgcttttcctcacaaagctgagtgggctccctaggttcaggatggaagtaaataggagtaccatcttaccttcagggacggcccaggagtggggtagcagccacagaagtggtaacat

SEQ ID NO: 36703 - DNA, 120 bp, Homo sapiens
cccgcctcaccggggccgcccctggccctgccccgcctcttgatccccaaccaggaagcttgcagtggtcccggggcccctcccttcctgctcatcctggtgtgcacggctccggagaac

SEQ ID NO: 36704 - DNA, 120 bp, Homo sapiens
atcgggattaatctgagcactgccaaatgcagatgagtcccagccaaggagggagggcaggaagctactgtctcaggggccagctgctgctgccgccagggggtccggggaagaggaatg

SEQ ID NO: 36705 - DNA, 120 bp, Homo sapiens
ctcggaatctcaaaagggaaaacagaggcctatggcttggcgcaggtcaggatagcagcctcttctgccctccctgcaggacacagccctgaccttgagatcaaaggcacagaaatccgc

SEQ ID NO: 36706 - DNA, 120 bp, Homo sapiens
cacggcgccggattgccctcaccctgattgtcccatcagtgtagcttgtctcaagaggtttacactgtggctgtgtttctcacaggttacccaaactcctatcataaaggcaggaaacag

SEQ ID NO: 36707 - DNA, 120 bp, Homo sapiens
ctcgtttggattagagttagctttgcccaaaggccgtttggacatgtgagtgctgcctttgttcttaaagacaggcagggtttgggatcccacagcttcactttgtaaaccattttcgtg

SEQ ID NO: 36708 - DNA, 120 bp, Homo sapiens
gacgtcagagctaaggaatgtgaccttccgctgctccagttgtaactccctgctgtcctcctgcttgagccttttagggtaaagttcagcacatatcaccctcgtcaaccgcgccccgta

SEQ ID NO: 36709 - DNA, 120 bp, Homo sapiens
cccggctaattctattgggttaacacgtccatgctggctgtgcaggcttatttaagtaattgcctgactgtgaatgaacagaggtattaaagtaaagttggcacaagggacagcatccac

SEQ ID NO: 36710 - DNA, 120 bp, Homo sapiens
gacggggctgcacctccggccacagcagctggagcgtcagcccggctgtccttaagtagcaagaagctgccggaagcgcaaacagaacttcgcaggggatttgttgatgtagttaaggtc

SEQ ID NO: 36711 - DNA, 120 bp, Homo sapiens
gtcgggcctgggaacagccgggctaggccctcctgggtgtgttggcccaaggctctggccctgactcctccccggctgcctcctcccaacaggccggcctcggccgcgctggcgactcgg

SEQ ID NO: 36712 - DNA, 120 bp, Homo sapiens
agcgctctgatctccagggaaggccagcagtcacagaaaaaaccaggcattgaaaggacagaggctgcaggacccagtacagacggcgctgctctccaatctcaactctcaagaccgata

SEQ ID NO: 36713 - DNA, 120 bp, Homo sapiens
gccggaggactacatttcccagagtcccccaagcccagggatgagccattggccgatttaaatagcccaggcccgaggcagccaggccgcagctgtggactcctcacctcccggaggctc

SEQ ID NO: 36714 - DNA, 120 bp, Homo sapiens
tgcggcggagaaggcagggaggcagccacggtggcggctctgggggcagctcttgtcttcggggagaaggcccttggagccgggctggcatcggccttctcggggtgagcgaggtcacca

SEQ ID NO: 36715 - DNA, 120 bp, Homo sapiens
agcgggtcagagtgggcagggcttcaggccgaactctcctctccagcggaggtctcagctgctttgctggggaacagagcagaggctgtgacaccagctctgggcacgctggaggtgctg

SEQ ID NO: 36716 - DNA, 120 bp, Homo sapiens
gccgttgcgtggggctgggagcgagtttaccaggctctgtcttcagacaaatacaagccaagcattgtgcacccagcacccacaaaccgtgtcacagcctgaccctcgtccccagagagg

SEQ ID NO: 36717 - DNA, 120 bp, Homo sapiens
tgcggaagttcctcttcttaccctgcacccagagcctcgccagagaagacaagggcagaaagcaccatgagtgggggcccaatgggaggaaggcccgggggccgaggagcaccagcggtt

SEQ ID NO: 36718 - DNA, 120 bp, Homo sapiens
cccgaagtggagtcctggtttcggggacccttccgcactccgagctttgcacctcacccggcctcgtccgggaaagcacgacctggcgaggccgccctaaccccaggtcccggcccctta

SEQ ID NO: 36719 - DNA, 120 bp, Homo sapiens
caacgcatatttgctacatgttcgtgtaatagtttgaaattagctgcagtagacatcccagcctgcagggaggctggaggacaaggcgaaggaacccatcgtgcgctgagcaagggctgt

SEQ ID NO: 36720 - DNA, 120 bp, Homo sapiens
gctcgagtgtgtggggccacccagccagtcaacaacacaaaccgaccagctgcctgacactcccgacgcctggccagtccaaggctcccaactcttacctactgccgggacacagctgtt

SEQ ID NO: 36721 - DNA, 120 bp, Homo sapiens
gcccgacactccggcagaaaccaacagtgcatgtgtttctccaaccacaaggaataaagagaaatacaatcaaatgcacaacatggctcttaaaatcgtaactatttgtaggggggtatt

SEQ ID NO: 36722 - DNA, 120 bp, Homo sapiens
atacgataaaacttgtatagccaaaaagcatcaaataatgcattttaacatatacacggcataaatgtgatggcatcattttaaatggaaataataagctgtaaacattatttgaaccaa

SEQ ID NO: 36723 - DNA, 120 bp, Homo sapiens
acacgagagttccaaaagtttagatgatcttcctgcaataatgtccaatggatgctgatgctcaacccatttatcttctagaaacaagagcctgtgtcactggccaagagtaaatactgc

SEQ ID NO: 36724 - DNA, 120 bp, Homo sapiens
atccgatcctatcagataggccaggggacatggggccaaataagaatgccttcttctggagactatcactactttttgtccacctgtaattttttttttttttttttttttttgagatgg

SEQ ID NO: 36725 - DNA, 120 bp, Homo sapiens
attcggtcccacccagggattgacgcccttcaaacagaaatgcacttcctgagaaaataagtcaacaggtcctgcagcctccagtgaagaatggatgacaccaagaagtttagagcgtca

SEQ ID NO: 36726 - DNA, 120 bp, Homo sapiens
cagcgaagtgaactagagagaaagcagccgtctcctggaaaacacctcagggtggtacctgatggctctgttgacagtcccctgcctcccaacggcactgggcacctcttaccaaatttg

SEQ ID NO: 36727 - DNA, 120 bp, Homo sapiens
ttccgatgcactagtcagaggcgtcagctcagcactattgctctgccccaacgtcctgatgcagtatctaaggatagcaaacttgctgcagacaaagtccagagcttctttccatcctcc

SEQ ID NO: 36728 - DNA, 120 bp, Homo sapiens
caccgccctcccaggcacatcctaagagctctgctgtgttcgagtgtcacttctgtgctacaaggcttgctatgatttgaatgtcgtctgtccccaccaaaagtcatgttgcaatctgat

SEQ ID NO: 36729 - DNA, 120 bp, Homo sapiens
gcccgtcatagacttcgcagccaccagaatcaggagttgaataaaccttttctttataaattatgcagactcgggtattctgttataggaacacgaaacagaatgaaacagtggtttaca

SEQ ID NO: 36730 - DNA, 120 bp, Homo sapiens
gaacgatgatggatgtatactcacaggggcaatcttgagagctcagaaaggacagggaatcaccctgagccactgttgtccagcatcagggtcaggagtccaaagctggagctcttatga

SEQ ID NO: 36731 - DNA, 120 bp, Homo sapiens
acccgtgtctcctgcagaatcctagagaggtttcaaagtgatgagtctgtctctccatgttggtgaaccctgaaacagtctacagccaaaaaagcaggaaaagggaagacacaggaagcc

SEQ ID NO: 36732 - DNA, 120 bp, Homo sapiens
agccgtggccacctgcgaagaggagaagagtggactgagctcccagaacctgcgtgtgaggaagaagaagagcacctgggaagaagacatcggcatgaaactcagtcctgggccgaagga

SEQ ID NO: 36733 - DNA, 120 bp, Homo sapiens
ctacgtaggactccgagaatgatagctgctgaaaaacgggacaagttgtcctgggtgactccttcctgcaaatcacaaacatgcaaatcgaggctgggcgcagtggctcatcctgtaatc

SEQ ID NO: 36734 - DNA, 120 bp, Homo sapiens
gagcgagactccatctcaacaaaacaaaacaaaaaaaaggaaacacgcacattgaggcggaacctcagaaactgcctgcagtcaccagcacctgggatgagaggctttagtgacccatcc

SEQ ID NO: 36735 - DNA, 120 bp, Homo sapiens
attcgatgattctatcacttcagatcaggggagaccagagcctccaattttcagcctcaacactgagaccgctggttgcagttctttattctccatacaattctaatctatactattaga

SEQ ID NO: 36736 - DNA, 120 bp, Homo sapiens
gtgcgttataacaaagtcaagcacaaaatttacggttattcacaatacagccttttaaaatgggtcacgtacaacccttccccaggcctatgtgccccaaggagctgattctccaaagac

SEQ ID NO: 36737 - DNA, 120 bp, Homo sapiens
aagatcatgttggggcaaaacaaactttaacatctcacctgtcaacctggctctggtcacgatcaaagctaagcttctttgaagaagccttgctactttgaggctggtaacaaggatcaa

SEQ ID NO: 36738 - DNA, 120 bp, Homo sapiens
aagatagggttgggaacggcctttgttgagaatggatcaaatacagaaaatagaataaacgctggctctcaaagtgagcttccccatccgcaccggatgtttgtgaatatctcaaagaca

SEQ ID NO: 36739 - DNA, 120 bp, Homo sapiens
gaggcaactggaggaatgagcccattagaaatcttcacttttctatacgttcaatgtgttctctgagtgtatcgccatcattgaaatatattttattcttttgggagggtaaaattttgg

SEQ ID NO: 36740 - DNA, 120 bp, Homo sapiens
ccaaattgctaggattacaggcatgagccacccacccatcctggagggtttatttttgagggaaattgcattgtagaggcccagagcataggctctggaatgagaatgtcgaacttagca

SEQ ID NO: 36741 - DNA, 120 bp, Homo sapiens
ttcaagttttggaagtcaaagcattgcttcagttttcacgtaaaaaaaatctttcaaaaaaggagaagaaataaattatactcagtaccttttcacaaatagaactcacctgctactttt

SEQ ID NO: 36742 - DNA, 120 bp, Homo sapiens
ttacgtttctacataagtaaattgcatacctatttcctttttattttgattcacaatttctggggtacattttattttatattttgataattctgctcatggaaaacaaaagggaatgca

SEQ ID NO: 36743 - DNA, 120 bp, Homo sapiens
aaccaagattaaaagcatgacttctgatcgtgtcacttccctgctttaaaaaaatctcctggaatcaaggttttccattctataggccaatcaggcctttccaagtgcatgatcctctgc

SEQ ID NO: 36744 - DNA, 120 bp, Homo sapiens
gagcgggtgttccaagaggcctaggtggaagctagatactggagaagtagtccaaattgtcctacagcatcaattaaggctccattccaggaccaagacaatctactgttgtgctatgca

SEQ ID NO: 36745 - DNA, 120 bp, Homo sapiens
gaccgaaagctcttctgtaagttctggaaggctggaagttaaggtgtcagcagggccatggtctctctgaaggttctaagaaagaatccttccttgcttcttcctagtttctgctcattc

SEQ ID NO: 36746 - DNA, 120 bp, Homo sapiens
gttcgaagtaaaaaggggtcattgttctcaaacatgttccaaacccagcagagtaaattcattaggtttcaaagcctgaaaataaaaggcttcatgctctgtcctcttggtcctcttctt

SEQ ID NO: 36747 - DNA, 120 bp, Homo sapiens
attcgcagcccagtagttctagctctatcagcctgtttcttgcctctgtgtgttaatacctatatgtgttggtaaacaatgtaagagcaactgaagtttaggactgcctaaatggtgagt

SEQ ID NO: 36748 - DNA, 120 bp, Homo sapiens
tgacgttatttcaatctagtgctttttctgctgtactccacaaattgagggcttaaatacatcctttgatagtaacatgcaagaagctttgtgcatgtagtttgtgaaacctatattggc

SEQ ID NO: 36749 - DNA, 120 bp, Homo sapiens
ttttgtctggataagttcctggacaaatgagctgataagcattacggtgtacatactaactcatatcttagaagactgtcacttctcatagaagcaaaattatatataattctattatat

SEQ ID NO: 36750 - DNA, 120 bp, Homo sapiens
cagcggcttgaatttgatctatctccattaaacttggatataggccaagtttataaagaaacacgtttattcctggatggagaggaagaaaaagaatgggcatttgaggtaagaaatttg

SEQ ID NO: 36751 - DNA, 120 bp, Homo sapiens
ggacgcaactgaatccagtcctgctgctctgaaagtgaaatcagggctactatgagagcatgtaacatttatactaatacttgaaagaagttgaaagatgagtcattgtgagttcagtac

SEQ ID NO: 36752 - DNA, 120 bp, Homo sapiens
gtacgggaaaggaaaagaggctctgacaaggagctttgcatgtatgaacagccaaacgcagccactttggctgggccataatgagggtatttaagagagattccagatcaggctggtaga

SEQ ID NO: 36753 - DNA, 120 bp, Homo sapiens
cagaccagtcattatactgtgattggtcctgcttgtgtccagcaaacgggctatagagcagttctctgacttacaagatcatctgttgagatactgaatactagaaaataaatgagatgt

SEQ ID NO: 36754 - DNA, 120 bp, Homo sapiens
gtggaaggctagaaatgcatccaggccaggcccttaactgaattccacaaatgggatggctcctgcgtagaatagtgtgatggttatggcaataaacttttgagttagcaagacacaggt

SEQ ID NO: 36755 - DNA, 120 bp, Homo sapiens
ccacggtattgaatctatttctccaataacattcgctggatgatagtaaacctattaatgagaaaatggatccagaaatgaaattctgcacacctccctcccaaaaaaaactctcttgga

SEQ ID NO: 36756 - DNA, 120 bp, Homo sapiens
ttacgcattatgtcttgatttccttggtactcctaggacaaaagaaccagtttcctaacttgttgaaattcttctactttattattcccagtgttggccagcatttctggcatttcattg

SEQ ID NO: 36757 - DNA, 120 bp, Homo sapiens
aaacgatgttaggtgtagataaagtaggaatttgcatacttggagtgatttaagggcatcatcacctatcagtatctttatataatttttgtcttggtgactgatatttccaccattcga

SEQ ID NO: 36758 - DNA, 120 bp, Homo sapiens
aaatattattgccgcacatgaagccagttctatgttccccatgctgtacgagcctggaggaggaatcaccagaagatgcctgcagaagaagacaactggactaaggctagcagatgaagt

SEQ ID NO: 36759 - DNA, 120 bp, Homo sapiens
cgtgacttgtagtttttatgaaaagatttactttccttttattagcaatggatttcggaaacagaactgatgaggagatgaagcatggattccacagggcattttaaaataagctagttg

SEQ ID NO: 36760 - DNA, 120 bp, Homo sapiens
tagcgcctcctttaaccgtatgtcatcacatataaccttcctggataactactcattatgcatgacggcataccaacctgtgagaatatgagggagaaagcattatgctcatcagaggct

SEQ ID NO: 36761 - DNA, 120 bp, Homo sapiens
gcacgatggcatactgtattttcagagtggctgcaatggagtgagtgaatgcaagagtaataggaagtgaggtcagataagccaggggaaggcaagggttgtgtaaggccttgtaggcca

SEQ ID NO: 36762 - DNA, 120 bp, Homo sapiens
gcacggaggttttgccagtggactggacaggggtatgagtgaaagctaggagtcaaggatgactcctacatgcttaaaacgagcaaatagaaggatggaattactattcgctgaaattgt

SEQ ID NO: 36763 - DNA, 120 bp, Homo sapiens
aggcgttcatcaaggcacgttacaaactaccatgtaaaagcgatatatctaggttttatgcaagaatttcgcaaaatgagggaatgggaactagttctgaactgaaggattttgttagag

SEQ ID NO: 36764 - DNA, 120 bp, Homo sapiens
gtccggcaccccatactgactaagcatcaccactttcaaaactgcagagtcaactggtcaatacatgtgaccttttctctattcatgggtaattcgaggatttcaaatgaaaagccatgt

SEQ ID NO: 36765 - DNA, 120 bp, Homo sapiens
acacgaatgagttttgcttccgttagaaaatgtcatcacgtttcagactgactcgacctattgttagagatgctttttctgtgacactagtggaagagaactggacgcaattcttcaggc

SEQ ID NO: 36766 - DNA, 120 bp, Homo sapiens
aagcgttatgcaaaggtggtcgcatgaactaaagtggaaaggaaagagatcaagaagcagcagtggtagacagatgccccactggcttcgcattgttgtttcgctggaaggacatagtgt

SEQ ID NO: 36767 - DNA, 120 bp, Homo sapiens
attgttgtttcgctggaaggacatagtgtgtcataacgaattaccattaatttgagccagcagtactattagattgagcccggcaacccaggatgacaaacagtgcctgcaagatcatct

SEQ ID NO: 36768 - DNA, 120 bp, Homo sapiens
cagagactcaaccaaatctcaattccgtagtactttgctatgctgttgtttcctaatgtcacctccctcagtaaaaaggaatatacatgatcaataaatgcgatatctttaggaacacaa

SEQ ID NO: 36769 - DNA, 120 bp, Homo sapiens
aatatccatcattaaggctgatttatgttctgttgccagcagtaattcaaagaaatgccacgctattcaaaaaatattgcatgttgtcctaccactttgccaatgttatgacaccacata

SEQ ID NO: 36770 - DNA, 120 bp, Homo sapiens
atgccaagaaactggaaacagaaaagttggttatctattttctagaaaagaaaccatcggtcttataatcaatctataaccaatgcaccctcccctcctcagcagcaacaggatgtgctg

SEQ ID NO: 36771 - DNA, 120 bp, Homo sapiens
tgccagttaaacaaaaggatcagcacagcatggggaaccagcagtgtgctagcacaagtttaacagctgacagcacctagagagagatgtcgggatcaaggcattttactatcagaccga

SEQ ID NO: 36772 - DNA, 120 bp, Homo sapiens
gaaatgaagagagttctgcctcatgctttagggccaattacctaaagatggtcaaggtcagttggtatagctggtgtacggtttatactctgataaaaaataaggattaatggaagataa

SEQ ID NO: 36773 - DNA, 120 bp, Homo sapiens
ggaggacaatcggtagaggcttctatttggcaatcttgttccacctccactcctcaaaaacagggttttgaggcataataaatttactactaaaagtctgtttgagcacttacctaactg

SEQ ID NO: 36774 - DNA, 120 bp, Homo sapiens
cccatccaccttcctgcaccagccatctcaaccaacaggagcagtgtgtgtgggcgctcatgaaaagacggcaggctattaccgaaagaactctgtttatacctcctatcggtaacgttt

SEQ ID NO: 36775 - DNA, 120 bp, Homo sapiens
tagtaatttcccttttatctggcaccgagtttaccaagaagaaggaagaaacaaatatcagttgtgtgccaggaactttgtacaaaagcattcccacatgccatgtgattaatctgctcc

SEQ ID NO: 36776 - DNA, 120 bp, Homo sapiens
atggactgtggatgccctcctagacattagattggggctgacatgacaaccaacaatataggaaggggctgagtctctgatacgatggtgaactggatctctggactagctttttaagtg

SEQ ID NO: 36777 - DNA, 120 bp, Homo sapiens
gtatagtgattttaagagtgtaccttgtggttcagtctcttccgagtctgaattctttttccatcacttatgatctgtgtcacctttgtcaagtcacagaatctctgtgcctcagtttct

SEQ ID NO: 36778 - DNA, 120 bp, Homo sapiens
gaccgcctcttcatacaaaataaaaatgtacacgatttcaatataatcatttccctttggtcctctgtgaacacaggaatagtgaattggaatcttcctagaaaacctttcccattcttg

SEQ ID NO: 36779 - DNA, 120 bp, Homo sapiens
accatgcctggctcttcgtttgtttgtttgttttttctaatcctagctaatcacattcttttagtttcccttgcttcaccaaggagtctggactccaggtcaagtcaagtgatttctttc

SEQ ID NO: 36780 - DNA, 120 bp, Homo sapiens
gaggccacatggtgaatatggtggatgggcaggataggctcagaatatcaagcgaagtgctggaggtgcttgacctgcagagggccatgctcagaggtgtgtgagtgaacggaacatggg

SEQ ID NO: 36781 - DNA, 120 bp, Homo sapiens
ctgcgagggacaggcccacgcgtgtggggagaacatctcccttccggggctgccctcaagagcttctgaaaaactaatgactctgctgccttctcctttgtctttgtttcactctgtgtt

SEQ ID NO: 36782 - DNA, 120 bp, Homo sapiens
cctcccactggcactgctgtggagcggggagaggggttcctgaaagcattagttgcattctgcggtccaagcgaggggaatgggtgcagtgacctggggtaaagcctgctctctgaaccc

SEQ ID NO: 36783 - DNA, 120 bp, Homo sapiens
ctgtctcctgggaagagaggttgtgagaggagaaagactcgggtttgaatctcagacctgctcatagttgtgggaccttgagcaagccatgaaacttttctgtgcctcaactttcatgtc

SEQ ID NO: 36784 - DNA, 120 bp, Homo sapiens
gaagagtgcctgggacacctggcttccctgacaacttgtgtcaccacccttttaaaaatctcaaaactcaaggattgttaacaacttcttcgctttctgacatttttgttttgtttttaa

SEQ ID NO: 36785 - DNA, 120 bp, Homo sapiens
catctaataatgtacctaccctcttttaatttgttctgaagtattcaggaccctgctatgccacaggtaatcttaaactgtattgctgagtgactttgcggggttgctgagtgatatagg

SEQ ID NO: 36786 - DNA, 120 bp, Homo sapiens
gaagcagggccttcctttgcccaggaatgcacagtagcttcttattggccttatgctcaacaattcgttcttctgggtcccccttcctcatcatccctcctaccatctatgataggtgga

SEQ ID NO: 36787 - DNA, 120 bp, Homo sapiens
attttaaagcaagatctcaaaagtgatcttaaaccaagtgatccctcaaaaagggaaaaggacccacaattgtccagagactactgtgggccatgtgtgccatgctaggagcttcgtgtt

SEQ ID NO: 36788 - DNA, 120 bp, Homo sapiens
agtggaacccgccacctgctggaaaggccggagccggcgcagagctagcgcggggcaatgtggcgccctctgcggggagcccctgctgcctcgcgccggcactcaaacctccagtacaca

SEQ ID NO: 36789 - DNA, 120 bp, Homo sapiens
aggcgtgagccaccatgcccagcctaaactacctgttttctaatgatctatttgccttctgtggattggttaggccactaacttgaatctcatgtagcatttcataggagttatatctga

SEQ ID NO: 36790 - DNA, 120 bp, Homo sapiens
gttcgtaatgggggcattacatccccaggggcatttgggaaatttgtgtcgttatcacattagtggttgtcactgatgggcatttagtgggctgtggccaggggtgttaggcagtatgca

SEQ ID NO: 36791 - DNA, 120 bp, Homo sapiens
tatcgtgttattgccgttttccataaactatccataaccaaattatgcagagaccctgcaatatttaaattcagtcatgaactctttatttgggttgcatgggccgattggagtttcata

SEQ ID NO: 36792 - DNA, 120 bp, Homo sapiens
ctacgggatgccagcgttgtatagcaccttataagttatgctggctttagtctcttagtgtgctggaactggctcataagacctagttgttccattttctggagttccaccactttgata

SEQ ID NO: 36793 - DNA, 120 bp, Homo sapiens
tgccgcacaaatctgcaaatactgtaagtcagaggcttcccttttgccacatattggcagtatggtagggggtaacttcctttcatttctcttaagtcttctcatttgtaagcaaaatag

SEQ ID NO: 36794 - DNA, 120 bp, Homo sapiens
gggcgacagagttaagactccaaaagaaaagaaaatagcaatactaatcctgcatgatgtgatgattagaaagcatatggcactttagtgttcaaattactgctttcattgtaatctttc

SEQ ID NO: 36795 - DNA, 120 bp, Homo sapiens
gggcgacagagcaagactctgtctcaaaaaaaaaagaattattgggttatctaccttttcttgccagtagagggaggagtggcctctttggagaaagtatgaaaccctgccctttcctgg

SEQ ID NO: 36796 - DNA, 120 bp, Homo sapiens
tggcggctgcagaccagagtgtggacagtctcgtgcactccacaccctccctctaccagtagcaccttcccagcctcttctcccctgccggtatccgccctcctccccttgccagcagag

SEQ ID NO: 36797 - DNA, 120 bp, Homo sapiens
gggcggggcctcattcaccaccctgtgtgtaccaaagctgttgcccctgtcactaaggagttgtcagaggagctgtgaacagggcacaaacacagaatgagtctaatcccccagctgtta

SEQ ID NO: 36798 - DNA, 120 bp, Homo sapiens
taccgcccccagctcccctccaccacattacctcactttgcgaggcctggaggcagggatgaggtgagaggcaagtgccccagcaattcctcaacccctcagagctctgaggaggtagac

SEQ ID NO: 36799 - DNA, 120 bp, Homo sapiens
cccagaggaacgggtgccccaggagtagtgctcccaccctgccacctggcccaagctggggtgagggtctgagagaagggcccaattcaacagcttatgtctaaaaaagaaaaacactct

SEQ ID NO: 36800 - DNA, 120 bp, Homo sapiens
ttacgataaccttgtgatatagggatttttacccctatttttcagaggaggaaactggcttaaaatttggggtcacttgcctgaaattatatagctggtaaatgacagagggaggtttgc

SEQ ID NO: 36801 - DNA, 120 bp, Homo sapiens
atccggttcttccatatgtgacaatacctggtattccctaggtgctgaatacgtgtttgtttagtctcctttctgcctacatgctcacccaagcaggtgtcaggaagcggccctgtcagt

SEQ ID NO: 36802 - DNA, 120 bp, Homo sapiens
ttccgtgagtagcacagtgccaaccccatcagaatattaccacatgtgtcaatcacacaccttgtggtgaaagcgagctgaacgcactgatacatgaagacatttctgactcctccctga

SEQ ID NO: 36803 - DNA, 120 bp, Homo sapiens
tggcggggtggatagcacccttggagctgggcatctggatggtggttggggtgttagggggatgtggcgatccctgcgacagacagcagagtgaggtctgaatctgagaagctctgcctc

SEQ ID NO: 36804 - DNA, 120 bp, Homo sapiens
tatcgcactcccagaggccccctcctcctgaaaggactttagtctttggagctgtcacctgagctgagtgggacaagagctctacagggcaggccacactgcgaaggaaggaggcaacac

SEQ ID NO: 36805 - DNA, 120 bp, Homo sapiens
acacgggcaagggctgcctgctgcccgctggagaccgcaccatggagccaggcggggcccgtctgcgtctgcagaggacagaagggctgggaggggagcgggagcgccaaccctgtggag

SEQ ID NO: 36806 - DNA, 120 bp, Homo sapiens
agccgccctcgggggtgcagaaggcacaggcaagtgggggggaggcggggagagatgcgctatggagagaaggctccaactgcctgatgccaatccttcctgctgtccagagaggccaag

SEQ ID NO: 36807 - DNA, 120 bp, Homo sapiens
agacgcacagagccccggacttggtacaatggacccgacacatggaggtgagggatgtcagaggtcagaggtcaagtggacagatccttggtagcaggaagcaggagtgaggcttggtga

SEQ ID NO: 36808 - DNA, 120 bp, Homo sapiens
tcagaggtcagaggtcaagtggacagatccttggtagcaggaagcaggagtgaggcttggtgataaagatgacttttttttttttttttttttgaaacaaagtctcgctctgttgctcag

SEQ ID NO: 36809 - DNA, 120 bp, Homo sapiens
ttccgccattctgtggcatcccctgtggatgggatcttggcgtccaattcactctcacctctgctcaggaccagcagcaaaacaaggaccattggcaaagccaccatgccctgtaatagg

SEQ ID NO: 36810 - DNA, 120 bp, Homo sapiens
taccgagatcccaagccgtagtggtagaagagccaaacaggaaacagaccagattctggtgctgctgcagtcactcactggctgtggggcaagtcagactttctctctgggctttagttt

SEQ ID NO: 36811 - DNA, 120 bp, Homo sapiens
tggcggcttttacaatcttggattctaaataagagaagagggtcagtgactgggaattaaagaaaagaaagctggagcagatgagggagtgtgtgaaagagtcaaggaagaatagttctg

SEQ ID NO: 36812 - DNA, 120 bp, Homo sapiens
aggcgccatatataacggagcctccacccctcggggagaggccagtcccagctcagcctcagcgtaacctcagccctgcttgctctgcatgcctgtggtcagggaggctggagatgctgc

SEQ ID NO: 36813 - DNA, 120 bp, Homo sapiens
agccgggttttgactcatctctcacaagtggagccccggctgccgcataggtttttcagagaccttaggcccactcatctccccttaaagggggccctgggacttcctggacagcccttt

SEQ ID NO: 36814 - DNA, 120 bp, Homo sapiens
ggacggaactgagctgctgggcctcagtgtcccaggacagtggagtctgtgaccaaggtgccgattaggaagaagtctgagctgaaggcagagcattagggatagcagctgggggtgatg

SEQ ID NO: 36815 - DNA, 120 bp, Homo sapiens
aatcggtatacctgccctacttcggtatagtccttggcacatggcaggcactcagatgacagcactcatatacatccctgcctccagacccactcatgggaaactgatgcaggagagatt

SEQ ID NO: 36816 - DNA, 120 bp, Homo sapiens
cctcggtatccaggtcagagccctcttcccaagaggttgggaccaggtgggccagagcttgtaaggagaggaggcagaagggctggtgccctggtactcacaggtgcgtgcagagcagtc

SEQ ID NO: 36817 - DNA, 120 bp, Homo sapiens
agtccttcctctggcggcagcagcagcctttgtgtactgatctgggagacggcagaggaggaagtgacactccccagggtggggaagatttggggttggtgggggtgactgatctagaag

SEQ ID NO: 36818 - DNA, 120 bp, Homo sapiens
gtccgacctgggagaccaacagccctgggaagacagagaggggacacccactcatgactcacccttagtgctgatgccccggaggtcggtgattttcattagcatccttgggaacatgta

SEQ ID NO: 36819 - DNA, 120 bp, Homo sapiens
ggccgccggcgccgggcgtacagcctcagggcttccagcagtggctcctgcagcttgtccactttttcgggctcctccaggtccatgcggtctatggggacaagtatactggagtgagag

SEQ ID NO: 36820 - DNA, 120 bp, Homo sapiens
aaccggcgttttgggaagcctgtacagggtttcagaactctctggatggggccaggtgcaagaattaccagcagaagagaccactgggtcctccacgccccctcccagacagattccgca

SEQ ID NO: 36821 - DNA, 120 bp, Homo sapiens
agacgccagggggcgcccccgcacctccgcagatgaggcagatggcgctgagcagccctgtctcggtgtcatccatctccaggggcaggagctgcccagcaaaggcaaagacaaggtctg

SEQ ID NO: 36822 - DNA, 120 bp, Homo sapiens
tcccgggaagtcaggaggagacagggcatccaaaagtctaggatcaggtcataggggcagaggctaagacgaaaagagagctgaggagtcccacatgtgtggcagggggtgcagggtaag

SEQ ID NO: 36823 - DNA, 120 bp, Homo sapiens
ggtcgggctgtggcaggacccacagggcctaacttaccaggatatctaggcaggcagctttgagcagagtgatctggtcagcaatgctgagccctgtaaagccaggcaaccgcttggcaa

SEQ ID NO: 36824 - DNA, 120 bp, Homo sapiens
ccacgatcttgatgatgcacttggtagccagctcactgaacttgtcccacagccccagatccagctgcacgcggtggtctgcactggagttctgcagaggggaggggtagaaggttggaa

SEQ ID NO: 36825 - DNA, 120 bp, Homo sapiens
agtcgatgatagcctccaacacaacccagccccattccccaaagtgaagagtgccctgccctcactgggctctgcccattcctcaccgtggtatacttgcccagctggcagagcgagggg

SEQ ID NO: 36826 - DNA, 120 bp, Homo sapiens
ttccggtcatttcgcacagcttgtgggtggaggcgcaaggagagggtcaggaccctcagagcctccctttgggtgtcctctctcaccctaatttaatatgctcagtccttatcatgaata

SEQ ID NO: 36827 - DNA, 120 bp, Homo sapiens
attcggctccatcctgtccttcctgtcaccctgcaggagctgggggagggggggcaggatatgcaggcggcaggatatccacttatagccttggcagcacaatgggggcgaggggggggt

SEQ ID NO: 36828 - DNA, 120 bp, Homo sapiens
tgtcgcggtgacacgtgtacaccatgttcttctggatgcttcggcgaaagaagccctggagttgagggaaagagagagggcctctgaagcacaatgctgggagtaccagcctctcactgg

SEQ ID NO: 36829 - DNA, 120 bp, Homo sapiens
ccccgtctgcccactcccaccacgtacacaccttgcagccttcacaagagctgaccccatagtggtagccagaggacttgtcattgcacacgaagcatggcttgtagacccgaggaggcg

SEQ ID NO: 36830 - DNA, 120 bp, Homo sapiens
gggcgagggcgagctgggcaccatctcctctgagctggtgctctgtgtctccaccgctgggagggaagcagtgatgtgagggtcaggggagaaggaccccacagacctccaggcttcctc

SEQ ID NO: 36831 - DNA, 120 bp, Homo sapiens
ttccggaaattgacttctctgggcctgtttccctaactatccaggaggtgggtagaagagttaaagccctgcagctctgagctctctagtcactctctgtctctttggtatatctttgtc

SEQ ID NO: 36832 - DNA, 120 bp, Homo sapiens
tcacgcctgaagaaactgaggccacgagaggggaagtgaccagctcagtgccacaccaccagcagatccaagtggctgtgagtcagagaagctggggaagcagaggctgaggtgtttgct

SEQ ID NO: 36833 - DNA, 120 bp, Homo sapiens
agccgttggaggtgtagcaaactggagaagtcaggtgacagtaggtaaacaggactgatgggggagggaacctgtttctggaccctctctgagcttatgtcttcactctgaaaataccca

SEQ ID NO: 36834 - DNA, 120 bp, Homo sapiens
gtgcgcgcgcgcgcgcgcgcgcgtgtggttggtcttcagaggctcggaaaatttgtaaattattcaacctgtaggacctgttgcccaaacctggagggcccaagttaatgcaaaaaaatt

SEQ ID NO: 36835 - DNA, 120 bp, Homo sapiens
ccacgcacccacctcatgaacaccttctcccttctaaccctctgcagcccacctggtcagaagcccgccccaacgcagccagaagggcggaaggaatgcccaggatgccagggttccacg

SEQ ID NO: 36836 - DNA, 120 bp, Homo sapiens
gaacgcctttcccaacctctcctcactcctcagacccaccactgtgtcctccaagggcacgtgttctgcccaaggcctgtgcgtggggtggtgctcactctggcactgacgccctccctg

SEQ ID NO: 36837 - DNA, 120 bp, Homo sapiens
gcccgcagagcgctgcctcatttcctctcttgcgcaagggcctgggtgcggtcagactggcatggggcagtgccagccaattataagactgggggccttagggagacaggcccgggggca

SEQ ID NO: 36838 - DNA, 120 bp, Homo sapiens
ctccgaggtcaatctgtgaggtcaaggccccagaaagctaactgggtctactccaatcagatcccctccccagactcgggcttagaccccaccattgggatgcagctcctgggttaggca

SEQ ID NO: 36839 - DNA, 120 bp, Homo sapiens
ctgcgcggagcttcaaacaaactctttataaccggctgtaaacgctcccagctgcgaggctcagagctgagcagcctggactcacaatctagcacacacctccttggagacacacacact

SEQ ID NO: 36840 - DNA, 120 bp, Homo sapiens
caccgtggaggtagatgtaccagtcacaaggctgacacacaacagccagcacttggccacacaagggaacagccctaccaccagacaaacaccccagcctgccaacgcagcaccaggaca

SEQ ID NO: 36841 - DNA, 120 bp, Homo sapiens
gtgcgggcaggcctgaagctggctttgtgtgtccaccaggatcccagaggccaaaattattggtcccaattaaaactcaaaaacctagggccagtcaagcccaaagggcttcttccatag

SEQ ID NO: 36842 - DNA, 120 bp, Homo sapiens
tctcggttctttaaatgacacacttttaaattcttcccccaccccacccaaaagtaaagtcaagtccggtctcctggtttgccatctccctcttccagcttcccagttgttaaatttgag

SEQ ID NO: 36843 - DNA, 120 bp, Homo sapiens
gtctcctggtttgccatctccctcttccagcttcccagttgttaaatttgagcagctctgctctggaaccaaaaaaaaaaatccgaacttgtaaacagcactgcttggtgccaaggagcg

SEQ ID NO: 36844 - DNA, 120 bp, Homo sapiens
aaccgcatacacgtttccaaacatttctttttttatatgggggtggcgtacaaaactcagccttctccctcttgtgtgcacaaccttttccacccggcatgagaacacacaggatgcact

SEQ ID NO: 36845 - DNA, 120 bp, Homo sapiens
tctcgaacacagcactttccaaaaccgcccccgcagccacgcaggggcacacgccctcccggcctcacgccacaaacatcccctcacaggccatgtggacctggcagctgtcgcaggcga

SEQ ID NO: 36846 - DNA, 120 bp, Homo sapiens
ctgcgcagcaagccggccccgggcccggccgccccgtacagccgtcgcggacccggggcaaacgtttccatacagtcgtacatcgcgacccggcttgaagggaaactgggtgctggaaac

SEQ ID NO: 36847 - DNA, 120 bp, Homo sapiens
acccgcagccgattccccctcctcccccggcggcgccccgctccagcagggggggagggggagggctagcatagggcgctgggctgcatgcgggtaaggggtgggcggggaagagggggg

SEQ ID NO: 36848 - DNA, 120 bp, Homo sapiens
gggcggggcgcgaagctggggctgccgctttagcctccgtccagctcttatctgggtgcttcggcagctagcactggggagaccttttttaaaagcgaagcctggaggggtggggggtgg

SEQ ID NO: 36849 - DNA, 120 bp, Homo sapiens
gggcttggagagcgaagggggccgggcaccgagatgagcaaagctgagagtggagcgcacacatacacatacgtacactcgctccgcggcgcgcgcgcttgcttagacacacatccgtgc

SEQ ID NO: 36850 - DNA, 120 bp, Homo sapiens
ggccgtagctgctaaagacagagaggcagcgtcagtggaactctgggaccagcactcctgggtccctgtcccggtcttcctgctctttctttgttccatttgggcttccctcaagaatac

SEQ ID NO: 36851 - DNA, 120 bp, Homo sapiens
gctcgcacctgggctgggaacgtgtgggagggaatccagcgcttcaaggaaagttcacagatccctatcctatgcaccagtccttcggaactcctggacgcggagggccaggctcacttg

SEQ ID NO: 36852 - DNA, 120 bp, Homo sapiens
tgggagggaatccagcgcttcaaggaaagttcacagatccctatcctatgcaccagtccttcggaactcctggacgcggagggccaggctcacttgcctctggacgttttccttgccttc

SEQ ID NO: 36853 - DNA, 120 bp, Homo sapiens
cggcgtcgggcagtctcttggatggagcgtcgcaatgtccggggctcgccgtactggggggctcctgggggggcacggctctaggctgggactgtcccggggcctctcggagcccgcccg

SEQ ID NO: 36854 - DNA, 120 bp, Homo sapiens
ccacgtgaccgccccaaaatatccgacacattttctcccaaaccgcacactgactctgcaggcggggacacggaaaatattttctttctttttctccctccccaccccccccccaacctc

SEQ ID NO: 36855 - DNA, 120 bp, Homo sapiens
tcccgccctcgctcctccctcccctgcctgcccctgcccggctccctcctctgtgccctggggctggggggcggagggatgggtgggcgggagggggactgggcggggcggcccgggacg

SEQ ID NO: 36856 - DNA, 120 bp, Homo sapiens
ttccgtgactccatcctctgggaggccgggcacggctggcagaggaggtcagtgtcctggccccgtgatgccaaccttttctctctggcacttttctcctttctgccttttggggggact

SEQ ID NO: 36857 - DNA, 120 bp, Homo sapiens
ttgcgaggccagtctctggcgcctccccagggtaggcaatggggcggtacccactccctcccagtgctggattggccgggcaggagtatgccagatctagaatagatgctcctgccctta

SEQ ID NO: 36858 - DNA, 120 bp, Homo sapiens
catcgaagagcaccagatcttgtctttctcatacaaccaatagaaggagtaaggctggaaggcagagagagagctggaggtcgctacgggtactcattgtagttcccctagaaaaccatc

SEQ ID NO: 36859 - DNA, 120 bp, Homo sapiens
agccgctcctgcacctcattaaccgtgtcactgaatacctactcaccccacctggagatttaccagccttcagccacagggacccactcccacagagagcctctagcacctagagacctt

SEQ ID NO: 36860 - DNA, 120 bp, Homo sapiens
acacgtgttggctttggtttgggctttgtgcagcagaatgagcatggattagaaatcaggtgatctgaattccagtcacagcacaacgagctgtctgagcttcagcgagctgctgaactt

SEQ ID NO: 36861 - DNA, 120 bp, Homo sapiens
cctcgatatgcactgaccactaccctgagtgcacgagttgctcgacttaatcctacctggaaccaccccgaccaagacactgaggtaaggtggcctgggaggagacccggagacctgtaa

SEQ ID NO: 36862 - DNA, 120 bp, Homo sapiens
agtcgaggcattgctaatctcacttcccacattttcattaagaaacagttatgtatattttgcctttgattgcagggaacttggctacctttataggattccccggaacaaagtcatatt

SEQ ID NO: 36863 - DNA, 120 bp, Homo sapiens
gtccgtgattggtttttaataggaactgttttcctccttttgtaggcctataccattcaaggacagtatgccattccacagccagatgtaagttttgttttcacttcttgttttgaaaag

SEQ ID NO: 36864 - DNA, 120 bp, Homo sapiens
catcgtaatagatgctctgtgcaagaggcttctgaaattccaccacgtggatatttgctctttatggtactttctggcctgtgcagctgtctccccaaaagctgttaaaagacaaggcat

SEQ ID NO: 36865 - DNA, 120 bp, Homo sapiens
acccgctctctgagaagttcctggtgtggaatgggcagggagctgggttcagggccagggatgacctctgaaggaggtgggtccagtgggatttctgagccctgggagcacatgtcatca

SEQ ID NO: 36866 - DNA, 120 bp, Homo sapiens
gaccgctcatctggccgctcatcagtgttggtgctgccaacttcaggtgtgccactgggggaaggttcactagctgtgccttcctccccatctgatggattctctgagctgaaggtagat

SEQ ID NO: 36867 - DNA, 120 bp, Homo sapiens
tggcgcatgttcaggctctgaggccacctacatgttgaagagggggattacagcttggttctgcccctagcagaaaacaagaatgccattaattcttgtaatgccatcacttacctctgg

SEQ ID NO: 36868 - DNA, 120 bp, Homo sapiens
ttccgatgagatgccacgtttctgcaggagagatggggtggggggggtctgattagaagtggaaagaggtcactaagaatccaggagaagggaacatagttacgaagggtgaagtaggga

SEQ ID NO: 36869 - DNA, 120 bp, Homo sapiens
cttcgggtgacggcagccctgtacagcagtgcagctggggtcaagtgctgggacccagcccggcttcctccccggcctgaggtcccttcccttccagttcccagaagccccacaccttca

SEQ ID NO: 36870 - DNA, 120 bp, Homo sapiens
ccccgggccggaggtggtgagccaggatccccagctccgcctgtggccccccggccccgggaccctagtgctgctgacagcaggtctggggacgatgaagacattttgcggagcaggagg

SEQ ID NO: 36871 - DNA, 120 bp, Homo sapiens
ccacggagggcgggagggcaggcctcccaggctgagggtccccctcctaggccccctgggcttcctggtcctccaggttcatggggtggcacagctgtacgaagcccaggcaggtcccca

SEQ ID NO: 36872 - DNA, 120 bp, Homo sapiens
tggcgctggccttgcggtgacgggtcttgccacggcgactccgtcctggtgagggggggcccttaggacacccaggaagccccaccccactcagggctgcatctagtttagggagcaaag

SEQ ID NO: 36873 - DNA, 120 bp, Homo sapiens
ctccgtcttgaggatatctggcctggaagaagaggaaaagtaaaaggttaagactgccaaatctatgtactcaaagcactccctaaccttggacactaaagtacacatctccctgctaat

SEQ ID NO: 36874 - DNA, 120 bp, Homo sapiens
ccccgggaagggtgtggcttcagcaggcctgggcacctccgctctaaagcttgctctcgcctaaagatccaggcaccttctcagctgggcaaatgaccaggaaggggcaccccagtctca

SEQ ID NO: 36875 - DNA, 120 bp, Homo sapiens
ccctctccttgagttccagctgcaacatgagggcattaagttccatatacaggttgttggctctctccagcttcctttcatagtgctccctgatgtccagggcgtgtctgcaacgggcag

SEQ ID NO: 36876 - DNA, 120 bp, Homo sapiens
cagcgatgcccatggaccagtcaaccagtaaggagggggtgacagggcggccagcccgcagtacctcatacagctggccctgggcgcagaactccatgaggatgcagtagcagggagcct

SEQ ID NO: 36877 - DNA, 120 bp, Homo sapiens
tttcgcaagtgcttgatgtcggtttctttgaggtctcgcaccttcttcacagccacctcctccccgtggaagcgccccaggaagacagcaccctgggcccctgagcccacccactgcagg

SEQ ID NO: 36878 - DNA, 120 bp, Homo sapiens
gttcgaggggacagggaaggaatgaatgggtggccttaaaagaagctgggaagttagaggctgatggatggctaagggactagggctgggccatggggagggaagggaccattgcgtgac

SEQ ID NO: 36879 - DNA, 120 bp, Homo sapiens
tagcggagctgaccaacagatctcgggctcagggaaacagagaggaggctcccacaaggacgtggcctaccttcctgctgctgcttgtgctcagtggagtaggctttgccaatcatggtc

SEQ ID NO: 36880 - DNA, 120 bp, Homo sapiens
gggcgcaggcagccaaagaggccctcaaggaagccactgccactctggcactgcagtcgcacctcgtcagctcgaactctggatgcccgactctcaggtgacccagctgctccccctggg

SEQ ID NO: 36881 - DNA, 120 bp, Homo sapiens
gggcggctctccacctggggaggggctgggccctcccccaccctgcccaccaaggggtaccacatctcgaagtacacactgggtaggcgtcaggtccttctcgggagtgcagtcagaagt

SEQ ID NO: 36882 - DNA, 120 bp, Homo sapiens
ttgcgcatggatgcctcacttagggtagacacaaagcccccaaaggaaggagagggtgttcgggtctcatggaggcaagccatcgcctctggcccctggtatgatggtgaacactgggcc

SEQ ID NO: 36883 - DNA, 120 bp, Homo sapiens
aggcgtttgatctgtagacatgaaagaaaaggaaactgttttagttttgatctgaaattaaaacttgatattaaatagtatatagagaatgcatttgtactttttgatttggagagagag

SEQ ID NO: 36884 - DNA, 120 bp, Homo sapiens
aggcgaaggctggtgtaggccaccagagggtgtctgtgttgtgttgcctcaaagccagcagggggaagaccgaacagtattttgttgtgtgactatccacgtacccacttttctctcagt

SEQ ID NO: 36885 - DNA, 120 bp, Homo sapiens
caccgcacccggcctcctctttacttttttaaatttcaagagagacaggtattatagtaaaaaagtgactttttttttttgcaggataattctaaacaagtaaatgcctagagatactgc

SEQ ID NO: 36886 - DNA, 120 bp, Homo sapiens
agacgtattttgaaatagcagcactgaacagacccgaaaagaaggctcagagcaaatgagacgtaaggccaaactaaaactaaatttttggcttttgactctgagccaggcacaagcata

SEQ ID NO: 36887 - DNA, 120 bp, Homo sapiens
atacggggattaggaatctaacagtttcaagctaactccttggtaaagcattgtgaccaatgaaatttctctgcaatatgcactcaactcctagccagatacattcctgaaatgttgctt

SEQ ID NO: 36888 - DNA, 120 bp, Homo sapiens
cacagcacccgttttcatgaggatttgcctcacatttaaaaacgctcttaatatcctgacctatgatgaattcatgtccctttccttgttttagaagagtagactggggtaagaagacaa

SEQ ID NO: 36889 - DNA, 120 bp, Homo sapiens
catcgcactccagcctgggcaacagaacaaggatgtctcaaacaaagtagactgtaaactactagagggttaaaaacatgtctcacacttattttttatccttttcacctgccccacctc

SEQ ID NO: 36890 - DNA, 120 bp, Homo sapiens
tcacgaaggcagaagggatccagagggctaaaagaacctgaacttggcccaagttattcccagagattctgagaaaagaggcactgagagcctcaccaacctccttagacggcacagcag

SEQ ID NO: 36891 - DNA, 120 bp, Homo sapiens
aaacggccttatattgtatgattccaactaaacaacattctgtagacggcaaaactacggagacagtagttttggcaagatcagtgcttgccagcggtcagtgggaagtgagggatgaac

SEQ ID NO: 36892 - DNA, 120 bp, Homo sapiens
atgcggtggaggaagaaattgcttcccagaaaggcttagcccactccattctactagataaaggaaaaacaaaaagccactccactctgacaagccgattactgtctatggagaagcaaa

SEQ ID NO: 36893 - DNA, 120 bp, Homo sapiens
aaacatacacagacatctagacccctgaaatttttagactacttttattgttccctcacaatacgtacaacctaaggagactacagtctccgttagtcctaaaaaatacctgaaactgaa

SEQ ID NO: 36894 - DNA, 120 bp, Homo sapiens
tcacgatttgcaattttttaaaaacgaaagtaaaaattaaaatgccaaaagaggaaggtacttaaaaaatgcatttatcagctaaaattgctcaaacataaattcaactgtcaggtctaa

SEQ ID NO: 36895 - DNA, 120 bp, Homo sapiens
agtcgtgggttctagttctagctccagttatcagctgggaccctagggaatgtcacggaggagcgtgggtgtcatctgctataccatgaaggaaaagccacagggtccttctgtgccagc

SEQ ID NO: 36896 - DNA, 120 bp, Homo sapiens
gaacgagaaatggaagggaggctgaggagggcgatggcatttcagggactagagagcttgagaagggatgcaaggattcctgaattctgaaattcatgggtttttgctcgagctaaagac

SEQ ID NO: 36897 - DNA, 120 bp, Homo sapiens
agacgtccccggcctagggcagcccagcctggccttgcctggattccagacagcatccagggccgacgtctggatctgtagggagcgctgttctctgccgccctcctgtggccgctgagc

SEQ ID NO: 36898 - DNA, 120 bp, Homo sapiens
cttcgcagatcgctgctgagaagattccgctcctccgcagagccgcgttcctcgccccctggtggaaattgcgtatattacaagaagcgatcttgggtttctagccgcagctttccccca

SEQ ID NO: 36899 - DNA, 120 bp, Homo sapiens
ttccggagatttaacactctatacctttgcctgaagttttaagttctggttttggaaagtggatagtggagacaaggggccgagattgaacagagggcaatttctcttcttcctctttgg

SEQ ID NO: 36900 - DNA, 120 bp, Homo sapiens
gagcgcagtccgtcagtgtcggcagggagatggattggcaggagccaggaggcaggaggcaggcatgatggagggagatggcatatttgacagatgctgacagggctcgttatttgctag

SEQ ID NO: 36901 - DNA, 120 bp, Homo sapiens
ctccgtgggggtgggcaagggagggagaggaagaggaagaggaaggggcagggacacaaggcagatgctggataagtcgtggttggaatgactgggatttggagctgagatttgatgatt

SEQ ID NO: 36902 - DNA, 120 bp, Homo sapiens
ggtcgggaggcatattaaaaggaattgagttccactgatttaggcactgatttggggagaactgataaaataggagctgaccattttactggggacttactatgtacagggtaggtctac

SEQ ID NO: 36903 - DNA, 120 bp, Homo sapiens
agacgcactccacctatttcctgctccccttcctgtgttttgagacctgccacatctccctgcacttgttgctccatgtgtgtctgaggggtgcaaggtgctgccgggctggggatgtgg

SEQ ID NO: 36904 - DNA, 120 bp, Homo sapiens
agtcggcttcccacctctcctcattccttttctcttagaatgtacaagacatgtagatatctgggtgggagagggggcccttgggtgccctcccagaatttccagtggctcccagtggag

SEQ ID NO: 36905 - DNA, 120 bp, Homo sapiens
tcccgagaggccaggggagcaggcagggaggggatctccatttggagtgtggagaatgttcgatgaggaggagaatgctgcagtcagagaccgcgctgcatcctaatcagcgctgcggag

SEQ ID NO: 36906 - DNA, 120 bp, Homo sapiens
caccgcgggccgtcaatcttccacacaaagggccgcccgccctcttccctctccaagccctccgcgccagcgcccccccaactccatccccaacactgcggggcaggaaaagaggcagag

SEQ ID NO: 36907 - DNA, 120 bp, Homo sapiens
tgacggacacacagacagggacagaaagacccagtaaattgaagccaagatggacagagtgggacccataaggcagagtgggtcccagcactctggagatgaagagagacggacagaggg

SEQ ID NO: 36908 - DNA, 120 bp, Homo sapiens
tgccgagtggaaagggaaagacagaggagagacagacctagagacaggacagagccaagacagaggagcatccagagagcagacagaaagatcgaagactcacacaaggccagagccacc

SEQ ID NO: 36909 - DNA, 120 bp, Homo sapiens
tcacggacacagaggcatgagaaggtcccaggcccagggagaaactgaaagccatgtaccccgagccaaaggcacactgacccagggccaggaccagggccagggccagggccgataata

SEQ ID NO: 36910 - DNA, 120 bp, Homo sapiens
gggcggggaggcctatatgtgtgagtgtgtatgggtgtgtgtgtgttgtgtgtgtgtgtgagcaggaacctggcaattccaagctcttcaaaatgccagagttgtctggtgctgaaccag

SEQ ID NO: 36911 - DNA, 120 bp, Homo sapiens
gggcgagaggggcacggagagagagggggctgttgagagggaggcagactaaggggaaatggggagggaaggcaggcagggcacctatctacctggagatgctgggctggaatcaaccca

SEQ ID NO: 36912 - DNA, 120 bp, Homo sapiens
ccccgttgacattcaccacagcaaagatcaacaagtgcaaatgactagggcaaattcagaatccaagccagttagttcatcagggaaggctgctaggagtgggggagttagagaggtgtg

SEQ ID NO: 36913 - DNA, 120 bp, Homo sapiens
caacgagctggattcaggaaccagcatgaaggggaatggaagggggcaggttttgaagtcaggctgggtgatctgaatttgctgagagaaactggggcccaatggggatgcactaacgtg

SEQ ID NO: 36914 - DNA, 120 bp, Homo sapiens
catcgtggaatcatagcataaagttaagctctgaaacttaagctgaggaatagcgatttgaaattagggacaattgtgagccactgctggcctcccacaaggggataagtcaggatgatg

SEQ ID NO: 36915 - DNA, 120 bp, Homo sapiens
atccgactagagtgtggggagaatagggaggtgaaggcctgatgggtggggagggggtgaagaaacaaggaacacattgtttccctagagcttgcatcacagacttctctttgaacaaaa

SEQ ID NO: 36916 - DNA, 120 bp, Homo sapiens
cctcgcctttcccccttctctaccagaggagctcttgcagccctagtagacacctgttgccactgctggtggtcacaatgatgggacaggatgtccccactggccagaactcctggattt

SEQ ID NO: 36917 - DNA, 120 bp, Homo sapiens
ctctccttctgggttggatgacccttgagttatttcagatttcatgtggaggtgctagaatttcctgggctttccttggccattgtgttgctcaggtcgctgtccccaagctttttcaca

SEQ ID NO: 36918 - DNA, 120 bp, Homo sapiens
aagcggtcatccatgaccaagtggtcatccatgatggataattcaatcttcaacacaatctacattctttccaaagaccagagtaatttccagactgacttaactgttaaccatgaacat

SEQ ID NO: 36919 - DNA, 120 bp, Homo sapiens
aaccggctgtaagcaagagaaaaatgttatctggctaatccatccacttgttaacatatatttggatatttggaaataatccaatgaaggactgaagttttcctttgtcagcatgtaggc

SEQ ID NO: 36920 - DNA, 120 bp, Homo sapiens
caacgctggtctgagtggcttggcattcattataaagagagatgccaatgtctcaaaagtgccagagaggctggcagactgcctaactataaggcagctgctgtgatttccataagagaa

SEQ ID NO: 36921 - DNA, 120 bp, Homo sapiens
ctacggttttggtagtgagttgccaaaactctgctttatttggtgctatgcagtttcaactatagtagccctgatctagttggcttatctctacaattcaaaccattagaaaactgtttg

SEQ ID NO: 36922 - DNA, 120 bp, Homo sapiens
ggtcgggcggggggtgcgggggaagaagagaaacacaaggttaaaaaattacccctcgttccttctacacacatctaggctaaagcaaacttgagtgagggaaggaagaaaatatcacat

SEQ ID NO: 36923 - DNA, 120 bp, Homo sapiens
aaccgagctcagagtcttgaagctacattgcactggacattctccctaagatttgaaattgtgtatatgacttgaagttgttacaggattgtctattacctaagagcaggcagaagagtc

SEQ ID NO: 36924 - DNA, 120 bp, Homo sapiens
gcggcgcgccagtgtgccccgccgcccgcaccccccacctcgtccagcgccaccctgggctacggctaccccttcgggggcagctactacggctgccgcctgtcgcacaacgtgaacctg

SEQ ID NO: 36925 - DNA, 120 bp, Homo sapiens
ttgcgcctaccacccgggcgataaatacccggagccgtcgggcgccctgcccggtgacgacctgtcctctagggccaaggagttcgccttctaccccagcttcgccagctcctaccaggc

SEQ ID NO: 36926 - DNA, 120 bp, Homo sapiens
aggcgatgcccggctacctggacgtgtcggtggtgcccgggatcagcgggcacccggagccgcgtcacgacgccctcatccccgtcgaaggctaccagcactgggctctctccaatggct

SEQ ID NO: 36927 - DNA, 120 bp, Homo sapiens
agtcgcagtccgcccacctctggaagtctcccttcccaggtaaggaagggacccgagcgccgccgccgccggggacccctccccgccctgcctgccccggggctccgcgccccaaccacc

SEQ ID NO: 36928 - DNA, 120 bp, Homo sapiens
ccccgccgtctggccccggcgcgcccgctcggctgggctgcctatggagccggccgggcgagctgcactgaggaatgcgccggggaagaaatctgctccgacacgttctctgtagctgcc

SEQ ID NO: 36929 - DNA, 120 bp, Homo sapiens
gctccgacacgttctctgtagctgcccggccgagaatgaagcaatcacaggcgcccgaaagccgggccgccggctctgctctgtccggtagctcgcctccgcctccccttgcaggctcca

SEQ ID NO: 36930 - DNA, 120 bp, Homo sapiens
ccggagccggcaggagaggagaacgatgtttaactcggtcaacctgggcaacttctgctctccgtcgcgcaaggagaggggcgcagatttcggcgagcgagggagctgcgcctccaacct

SEQ ID NO: 36931 - DNA, 120 bp, Homo sapiens
gcccgagttctccacggtctcctccttcctgccccaggccccctctcgtcagatctcctatccctactcggcccaagtgcccccggtccgggaggtctcctacggcctggagccatccgg

SEQ ID NO: 36932 - DNA, 120 bp, Homo sapiens
catcggaacagctactcctcctgctatgcggcggccgacgagcttatgcaccgggagtgcctgcctccttccaccgtcaccgagatcctcatgaaaaacgaaggctcctacggcggccac

SEQ ID NO: 36933 - DNA, 120 bp, Homo sapiens
cagcgccccgcacgcaacccccgccggcttctactcctcagtcaacaagaacagcgtcctgcctcaagccttcgaccgtttcttcgacaacgcctactgcggtggcggcgacccgcccgc

SEQ ID NO: 36934 - DNA, 120 bp, Homo sapiens
cgccgagcccccctgctccggcaagggcgaggccaagggggagcccgaggcacccccggcctcgggactggcgtcccgggctgaggcgggtgccgaggcggaggctgaggaggagaacac

SEQ ID NO: 36935 - DNA, 120 bp, Homo sapiens
gctcgtccggttcagcccactccgtggccaaggagccggccaaaggagccgcccccagtaggtagcagcggccggggaacgggcgggcagcgagggagggagcgagagagggagggcgag

SEQ ID NO: 36936 - DNA, 120 bp, Homo sapiens
gagcggggacggcctcgtgttttgggtcagtccgattttatgtggagttttataagcattcaaaggattttattataacctacaaagccctctctcccaacgactcgactttttacgatg

SEQ ID NO: 36937 - DNA, 120 bp, Homo sapiens
agccgggtgaacccccctcccccgttatctccctcggtctgtgaaatttttaaaagcgcaaccattgcgggcgatattaactttgatcgtgaacttagaggagcatttaaggaagtatgg

SEQ ID NO: 36938 - DNA, 120 bp, Homo sapiens
agccgggctgccgaggagtggggaggaggggaggggtggagggggagaaaggggagggcgagggaaagacagggagagatccagagagggggagaggtgggggagaggagcaatggagca

SEQ ID NO: 36939 - DNA, 120 bp, Homo sapiens
gaccggagaggcaagccaggaccgctatgatccttcttaaaactagttttgaaaatgttcaaactatgtgttcgcgggtcctcgagcagaaacccaagcaactctggggtcagcggcgac

SEQ ID NO: 36940 - DNA, 120 bp, Homo sapiens
gggcgaggcggcgcaggactccactgcgttccaggcgggggtctgggcgtttctcccgggtccgcggccttagtgcttgcctagaactgcggtgtggaaggcgctgccccgcgggcttcc

SEQ ID NO: 36941 - DNA, 120 bp, Homo sapiens
tcccggggcgccagggccccggaagcggctctctggtgtctcggtgcctgctggccggcttcctccccgcctcccgactgctctcgccagatttcactgcttcgcgcctgttctcagctt

SEQ ID NO: 36942 - DNA, 120 bp, Homo sapiens
ttccgaaccactaggagggcggcccaggaagggcccgagggcggagggggagcagacagggggcccgaggggacgcacgtgtacctggagggctttccttctgtcccagaccctgtcagc

SEQ ID NO: 36943 - DNA, 120 bp, Homo sapiens
agccgcggctctcgcctgagaactggggacggggtggcgcagtggcgggggggtggggacccgctagacctggcagggggtcgaggcttgcccgggtgctgcggctgcaggagagccagc

SEQ ID NO: 36944 - DNA, 120 bp, Homo sapiens
agccgcctggcgggagggctgcccgcggtgggctaggagaagggccgctgagcgctcagcgggctggggtcgcccgggtctcacgtgtctctctcccccctctcctcgcacttgccccct

SEQ ID NO: 36945 - DNA, 120 bp, Homo sapiens
agacgccccccgcacccgcaagaagcgctgcccttattcgaaattccagatccgggaactggagcgagagtttttcttcaacgtgtatatcaacaaagagaagcggctgcagctgtcccg

SEQ ID NO: 36946 - DNA, 120 bp, Homo sapiens
tgacggaccgacaagtgaaaatttggtttcagaacagaaggatgaaagaaaagaaactgagcagagaccggctgcagtatttctcgggaaatcctctgctgtaacctgcagaccgggccc

SEQ ID NO: 36947 - DNA, 120 bp, Homo sapiens
gggcggggggaggggaaaattattttattttatttttattttttattttctaactcgtcttctttccgccggtggaaaactggactgtggccagggctggcccccaccgctgtggccggc

SEQ ID NO: 36948 - DNA, 120 bp, Homo sapiens
ttccggaacctcctggaccctctatctgactctcgctgtgggacagggaccgggcctggaaagggggtgaagggaagtgtctgatgcacggcgagtgaacaccgttggcgccgaggccaa

SEQ ID NO: 36949 - DNA, 120 bp, Homo sapiens
cctcggcgacaatgtcttgctgctcggattaggtgggggaggggcgacagtagtgagcgcctgagccgaacaatcctcgaactaaaagccttcccttgcccatgtgaaaagatccgctaa

SEQ ID NO: 36950 - DNA, 120 bp, Homo sapiens
atccgctaagacagcatgtctgccagcggaaacttctcgagctcccccctctaccccgccccaccttgcagctaaatgtgatcctgccttgctgtgaaatttctgtaccttcaacctggt

SEQ ID NO: 36951 - DNA, 120 bp, Homo sapiens
gggcgacaggaaagacaagttgttctccagattccgtttcctgaggaaggggtggagagtttagttcgctttggaagaaggcgatggagaaacggaaataactgtttgaaacatacggtt

SEQ ID NO: 36952 - DNA, 120 bp, Homo sapiens
gcccgtgcgctctgtaaaggacgcttctctgggtcgggttttgttgcgtcttgtgtgctggtttcccgtgtgatacgtgactcctccaaactgaccgaggctccgcaggttccctctttc

SEQ ID NO: 36953 - DNA, 120 bp, Homo sapiens
tcccggaatattccctgttttagcgggggcaaggtcaagcggaaagcgaggaccgccagggcctgaagtaaagcagcagaaccggctccaaggccaaagccttgtgggcccctgagatgg

SEQ ID NO: 36954 - DNA, 120 bp, Homo sapiens
agccgcccaccctgccaggcccaggccacagctctcgggtcggggatcgggtgcctctggtctctggcttcctctttcccctaccccgcgtccattcggaacctccttttccgagcagcc

SEQ ID NO: 36955 - DNA, 120 bp, Homo sapiens
gaccgtgaccccctccctggcccaccctagaggctggagattcccagtcaacccccacaggaaacttgcaactccagcgccgcggcccccaagcttccagccccgagggccaagcccggg

SEQ ID NO: 36956 - DNA, 120 bp, Homo sapiens
aggcgggagagcagaaactttagtcctgtttggtattccttaactttttttcccctttctctgctcatcagatccccccaaacccccccccccacaaacctcaccccactcccatcccca

SEQ ID NO: 36957 - DNA, 120 bp, Homo sapiens
ccacaaacctcaccccactcccatccccaaggtaagaagtgggagtcgggtccggggatatggaaaggggagatgaagagtggggagaagtacctgattcgtgtctcgaccttttaattt

SEQ ID NO: 36958 - DNA, 120 bp, Homo sapiens
cgacaacttgaccccgctgacgtcacggccgtctgaatcatcaaggccattttcaaatcccattggtctagccgtcacatggtgagaaccgaatgcgcggataattacggagctgatatt

SEQ ID NO: 36959 - DNA, 120 bp, Homo sapiens
aaccgcgccccccctcccggatggggaaaaaaaaagatgtcagctcctccgctgtagtattgctccttaaaaacccctctctctgaaaatgacatgccctcgcaatgtaactccgaactc

SEQ ID NO: 36960 - DNA, 120 bp, Homo sapiens
actcgtacgcggagcccttggctgcgcccggcggaggagagcgctatagccggagcgcaggcatgtatatgcagtctgggagtgacttcaattgcggggtgatgaggggctgcgggctcg

SEQ ID NO: 36961 - DNA, 120 bp, Homo sapiens
tcgcgccctcgctctccaagagggacgagggcagcagccccagcctcgccctcaacacctatccgtcctacctctcgcagctggactcctggggcgaccccaaagccgcctatcgcctgg

SEQ ID NO: 36962 - DNA, 120 bp, Homo sapiens
ggccgctgtcctcctgctcctacccacctagtgtcaaggaggagaatgtctgctgcatgtacagcgcagagaagcgggcgaaaagtggccccgaggcagctctctactcccaccccttgc

SEQ ID NO: 36963 - DNA, 120 bp, Homo sapiens
tgccggagtcctgccttggggagcacgaggtacccgtgcccagctactaccgcgccagcccgagctactccgcgctggacaagacgccccactgttctggggccaacgacttcgaagccc

SEQ ID NO: 36964 - DNA, 120 bp, Homo sapiens
tttcgagcagcgggccagtctcaacccgcgcgccgaacatctggaatcgcctcagctggggggcaaagtgagtttccctgagacccccaagtccgacagccagacccccagccccaatga

SEQ ID NO: 36965 - DNA, 120 bp, Homo sapiens
agacggagcagagcctggcgggccctaaagggagcccctcggagagcgaaaaggagagggccaaagctgccgactccagcccagacacctcggataacgaagcgaaaggtaaggccgcct

SEQ ID NO: 36966 - DNA, 120 bp, Homo sapiens
ggccgcgggcgccactgggacgttccggcacttggtcttcgcggccggggaggggggcaggggagagggttgggcccaggaggccccagaccatttcgggaatgcgaccctggctttcga

SEQ ID NO: 36967 - DNA, 120 bp, Homo sapiens
tagcgtccgctgagctccaggctggtggcgcgtcacttagctggggaaggtaagcggcgacgtggaggtgtcggccctgccccggccatgggtgctaaggcgggggcggtgcgcaccgcg

SEQ ID NO: 36968 - DNA, 120 bp, Homo sapiens
ggccgcctgcaggcgcagtgtgctgcaccggacgggtggctgctcccaggcgcgtgctggctgtggtttgctttctcaatgctggtgtcctggggagctgacgtcccccagctcaggtca

SEQ ID NO: 36969 - DNA, 120 bp, Homo sapiens
tggcgatcttgggccagggactagggaaggctggggagatggggggagttctctttactgcgttttcccagttgaaaattgtttcctgcgaaacgcgatttgttgtttgtgggtctgatt

SEQ ID NO: 36970 - DNA, 120 bp, Homo sapiens
gtgcgtgcggcttgggctcctgcggcttttggctcggccgggggccttgggcagcgaggctggagccggaagaggtggaggtgaagggctgcccgccacgtccctccctcctccagatgc

SEQ ID NO: 36971 - DNA, 120 bp, Homo sapiens
tggcgttggaacagggcatttggaatgttgtaagttttctgtttcctcttttaattttttcttttccatttttttctagttaaattatcttttttcattggtttccaaaagcagcttaca

SEQ ID NO: 36972 - DNA, 120 bp, Homo sapiens
gtgcgtggcaagaggttttctcctgaaagggaatgtggctttggttggatttcactgtaattttggttgagagaaagcccagccagagttcaagctcagggttcaagattcatttctgct

SEQ ID NO: 36973 - DNA, 120 bp, Homo sapiens
cttcgggatctttctctgatacttggggaaagaatgtggaggaaacgggagcaggggaggaaaagctgaggggaacgacttttcctgaaaagttgtagcaagagcctcagaaaaaggccc

SEQ ID NO: 36974 - DNA, 120 bp, Homo sapiens
tttcctgaaaagttgtagcaagagcctcagaaaaaggcccaaccaacggggaagaataaacctgctccccacaacaccggctactggtgacagtatataaggggctcattgggtgtagag

SEQ ID NO: 36975 - DNA, 120 bp, Homo sapiens
gaatggttagcctctcccacctaccacctccagtcgactggggctcaagattctccttagaaaagtggggtacctggaggttccaagagttggggaactctgagcgccagcccagccctt

SEQ ID NO: 36976 - DNA, 120 bp, Homo sapiens
cgggctgtggccggcggcgaggcgggcaaccgcatgttgagtctatagaaaggaccttgaggtctgctgggtgtttgggctgccctgggggcggcggcccagagtgtggagcaagcggcg

SEQ ID NO: 36977 - DNA, 120 bp, Homo sapiens
gcgcgcggggcgcggcggtcagcgtgggagaggctgcaggccctgcacgcctctgcagctgccgggccgtgtccgggacgtctgaactgaggccgaccaatggtcacagcatgaaaaata

SEQ ID NO: 36978 - DNA, 120 bp, Homo sapiens
ttccgcgtaaaaggtcctttcttttttctctctttcggatatacctggatttggtccagaccaggttgcccgcgggagggccccgcgagcggcagcgcgcgagggagggagagagaggga

SEQ ID NO: 36979 - DNA, 120 bp, Homo sapiens
gggcgagaaggagggagggagggaaggagggcgggcggcggcggccgtggtggccggggcttccctccccaggcgggagccgcctgtcctgtatctatggccgtggggagcgaaggacca

SEQ ID NO: 36980 - DNA, 120 bp, Homo sapiens
taacgaaggcgcttccgaagcgggattggaccaaaccagagggacagagtcttctgggtctctctgcctgaggccctggagggagagaaggtagggagatcggcgcccgccgggcctggc

SEQ ID NO: 36981 - DNA, 120 bp, Homo sapiens
cctcgggaaatgttgaacctgtatgtgatctcaggctcacactcatgttgtgggtctgtctgcctcaggagatgcggtttgcctttctgtctgagacgccccaaaccctgagctctcctt

SEQ ID NO: 36982 - DNA, 120 bp, Homo sapiens
aatcgggaaaaacggcggaatttgcactttcattcattgggttatctgcaactgagaggggctggttaaggcgtccccaagttggaagggcgctttgcttctgttttctggatgcagagt

SEQ ID NO: 36983 - DNA, 120 bp, Homo sapiens
ccacgggctgagtttccggctccaggttcgcgtgtcgccctgaggtttgaggccagacagctcgcagtcgggcagggagggcgggggagagacgagcggctctggccccttaattgtact

SEQ ID NO: 36984 - DNA, 120 bp, Homo sapiens
cttcgggctcgtattgtctctcctttcgccacctccgcttcctcagtctgggctccaaagtcactgcaaatttccttgcgacacatacatcacacaaaagatcaggtaacaaggcgctca

SEQ ID NO: 36985 - DNA, 120 bp, Homo sapiens
ctccgggcagggcagggagcggctctagctctggggcggctccccctccagccactcccaggctggaaaaccagaccgcgttgggggagccggaaatagccccgcttgctgcggagcgtc

SEQ ID NO: 36986 - DNA, 120 bp, Homo sapiens
gggcgggggcgccggcgggaatgcaggcccggcaggccgtggctttgagagagccacgttcacaggccctggggatttcactcctgctgggcctcgggacctgactcctggtgtgtaggg

SEQ ID NO: 36987 - DNA, 120 bp, Homo sapiens
ggacgcgggtttcctcgcggcaggccaagagaactcagtttctgcttccagcgcaggccttagctaggaggagttgtgtgtgggtgtgtttttcccaacaaagagggatcaggagagaga

SEQ ID NO: 36988 - DNA, 120 bp, Homo sapiens
gggcggggaggggaagagggcagtggagaggtgaaatgagcccatttcagggggagaaggaaaatgaaagcaaatggagtacggccttctccgcgcagggcgggtgctgacgagccggga

SEQ ID NO: 36989 - DNA, 120 bp, Homo sapiens
gagcgggctccctgcctgcggcagccgggatggcccgctggggacaccggagaaagcctgttttaaatttaatccgaacttgacggtgtggattgaaccggagggaatttaaatcactaa

SEQ ID NO: 36990 - DNA, 120 bp, Homo sapiens
aggcgcggggcagggggaggggacgactctaacctgtctatctttctgtctgtccttcccacggtgctagtttggttgtggccgcagctgcccaggtttcaggtgatggagtaagggtgc

SEQ ID NO: 36991 - DNA, 120 bp, Homo sapiens
ctgcgagctaaagctggggtttccccctccccaacaagaactcccagtggcctccagtccctgggtttgccccagcggtgctgaggaaaattgaagggagtatgtgggtgaggggaagtc

SEQ ID NO: 36992 - DNA, 120 bp, Homo sapiens
ccccgccccccgcacctacaaacctggatttgagggaaatctgcaggtccgcttcaaagccctggtctgccacccacacccctccaaatgtggagaatgggggctacaggccacatgcag

SEQ ID NO: 36993 - DNA, 120 bp, Homo sapiens
ctgcggaacctccgcccagtggactccggaactcccagcctcttctagcccccctccccaaggccgcctctctccgaagggcgcagggaaaatgaggcattggctgggaaggggctgtgg

SEQ ID NO: 36994 - DNA, 120 bp, Homo sapiens
gggcgaggcctgcttcctgatccacagccgtgcctgcctctgagtgggaagagttcggaggtcatagtcccagaaaataaaataaaataaaggaaagcgacaatctccttggtttcacag

SEQ ID NO: 36995 - DNA, 120 bp, Homo sapiens
tcacggcagcagggatcccgccggtgagcctcactgcccgctgctgccgcctccgcagagtgggcaggcagggtgcgcaggcagctcaagagttgaaaagaaggcggtgttcaaaggggg

SEQ ID NO: 36996 - DNA, 120 bp, Homo sapiens
ttacggccccaatgtctatttgaggaactctcccaaatagcagaggcccataggggaggctccttagggactctttcctccaggaaagctgaggctggggcagctggccttgtcgcttgg

SEQ ID NO: 36997 - DNA, 120 bp, Homo sapiens
agacgcaaaggaagagcaggggtgaaacctctttcctcttctgtttcttcgctccttgaatagagcagggctcagcccccagctgcctaagcggctgtctggaccaatatggggttctat

SEQ ID NO: 36998 - DNA, 120 bp, Homo sapiens
atccgagcaagtctcctgggaggggcaggagaggagccctcttccgcctttgtgtccagacagaagtggccgccgcgcccggagccggtcccgcggcaaaggcccggcaagccagcgggc

SEQ ID NO: 36999 - DNA, 120 bp, Homo sapiens
ccacggctgctccgccagctcgcccctgccccgtcctgcctgcctacggccgcccttcctccgcctccctctctgcacgcctgcctttcccggctctcctatctcttttcatcttgcctt

SEQ ID NO: 37000 - DNA, 120 bp, Homo sapiens
ctccgcttccttctttcctctcttgggcctgactccatgtttcagttggtctgtcccaggctgtctcgggttcagtctctctcaggctctgtcccctgatgtcctcttggtctcagtctg

SEQ ID NO: 37001 - DNA, 120 bp, Homo sapiens
ccccgggccccgctgagggctaaacgtctctgctcatcgctgccagcagccgcccaagtgccgggcccggtcctcagccgccctgggctgggggaggtgctggctgtactggggatttgg

SEQ ID NO: 37002 - DNA, 120 bp, Homo sapiens
cctcggcagggggactggaacctcctgtcttttccttgaactagtgagggagattttttgattgacagctaacccaactccatcaaggccaaagagatattctgtttcttgttgtaagtt

SEQ ID NO: 37003 - DNA, 120 bp, Homo sapiens
tggcgccaaggagctgaacccccaagtcgcctctccccaaccaaacacatccctcatcctcccccatgagttgaaatcccagccccgttaagccgcccccttagaccaaaaaggaaaagg

SEQ ID NO: 37004 - DNA, 120 bp, Homo sapiens
ggtcggtgctgccagctgcagctgtctccccctaactttcctccccccggaacacacatactatacacactctccccagcccctctccaccccagaggagaaagatccatagagacgcag

SEQ ID NO: 37005 - DNA, 120 bp, Homo sapiens
ccccgcccctacccctggcgtttggtcccctcctggggacaggagagggaaagaagggcaggcgtggccgggtctgggaagactcctaccctgctgcctccagagcctgcatctcaacct

SEQ ID NO: 37006 - DNA, 120 bp, Homo sapiens
atccgaccccaaagaaattgctttctcctgttcctccgttgcttttttcccgttccaaaaacagcctacaattttatttaatgaaagatacatttatgaacaatcaaatgatcctcataa

SEQ ID NO: 37007 - DNA, 120 bp, Homo sapiens
tcaaatgatcctcataaaaattttattgagggacgtaaaaacaagctacttgcccacgaccgaggtcgctcttttgccttgcccgctctcaccctggctctctgcagacagagcccggga

SEQ ID NO: 37008 - DNA, 120 bp, Homo sapiens
gatggggacgccccacttaagttgtgtagatctctcctacacttcttcaagctggcaaagaaagataaatagatatagacaataaatttaaaataaaggcgcctgtatatctgtgccaaa

SEQ ID NO: 37009 - DNA, 120 bp, Homo sapiens
aatcgctgatctcggctcgcgcagagactgcgggagcgtcggggccgacagagacggattacgtcaagaaatagttcctccacctacctcggtcggcctccccgcccctgcggggctccc

SEQ ID NO: 37010 - DNA, 120 bp, Homo sapiens
tcccgcgcccagctcggccctgggggtccgagaaccctggcttcggggactggcattttcaccccattaaaaaatcctcatggttggggggaggccatctgcttatgggtggacatgggc

SEQ ID NO: 37011 - DNA, 120 bp, Homo sapiens
agccgtcctgagggggtgaccggtgccttgggtccagagttccggacccccaggaaatcgcaggtcgcggggagcagcagagagaagggggtgggagagggggaaaagaaggcaaggaaa

SEQ ID NO: 37012 - DNA, 120 bp, Homo sapiens
ctgcgcattgatccgcgccgtatttttgggtaaatacgatcacgtgggggccggggagccaatgagctgtggggaaaaggctggaaaaataattacctgacttgattgttctgtgagcag

SEQ ID NO: 37013 - DNA, 120 bp, Homo sapiens
ccccgttacgatgtcggcgacggggcccatcagtaactattacgtggactcgctcatctctcacgacaatgaagacctcctagcgtccaggtttccggccaccggggctcatcccgccgc

SEQ ID NO: 37014 - DNA, 120 bp, Homo sapiens
cgccgccagacccagcggtttggtgccggactgtagcgattttccgtcctgtagcttcgcgcccaagccggcagtgttcagcacgtcgtgggcgcccgtgccctctcagtcgtccgtggt

SEQ ID NO: 37015 - DNA, 120 bp, Homo sapiens
acccgtacggcccccagccccacctcggcgccgacacgcgctacatgcggacttggctcgagccgctgtccggcgccgtctccttccccagcttcccggccgggggccgtcactacgccc

SEQ ID NO: 37016 - DNA, 120 bp, Homo sapiens
agccggacgcctaccccgggcgccgcgcggactgcggcccaggggagggccgcagctacccggactacatgtacggctcgcccggggagctgcgcgaccgcgccccgcagacactgccct

SEQ ID NO: 37017 - DNA, 120 bp, Homo sapiens
cctcgcccgaggcggacgcgctcgccggcagcaagcacaaagaggagaaggccgacctggaccccagtaagttgggagcaattttcctttacaaccggcgcgggaggggaggggaggacg

SEQ ID NO: 37018 - DNA, 120 bp, Homo sapiens
gggcgggggcagccgaattacagccctcccgaaccgtgcagggagcgcgggagaggggcgagggggcgaggactcaataaaagcgaattaccttggggagctttcaggggcaggaggtct

SEQ ID NO: 37019 - DNA, 120 bp, Homo sapiens
ggccgaggggagctcctctctcaggagctggctttgatgagagacccctgccccctcctcccagcccaggctttttggctcagtcaccactttcgaagaaaggcggacagggccagggga

SEQ ID NO: 37020 - DNA, 120 bp, Homo sapiens
caccactttcgaagaaaggcggacagggccaggggatggggctgggggcgaagttcagtttatgatttgagatgggacagggaagaggtgaggaggacactgggggcacagaggagatac

SEQ ID NO: 37021 - DNA, 120 bp, Homo sapiens
gctcggcagcggcacagaatgagggaagacgagaaagagagtgggagagagagaggcagagagggagagagggagagtgacagcagcgctcggtaagtgtttccttattggttcaaatat

SEQ ID NO: 37022 - DNA, 120 bp, Homo sapiens
gtccgtggcggtttcaagaataggacagcagcggcttctcttggttagggagaagagggggctggcgagagggtgggcgcgtagttaattatggggaggaaaattggcggggggagagaa

SEQ ID NO: 37023 - DNA, 120 bp, Homo sapiens
aaacggggttaaactggaataccggtaactggtagtggggcgattgtgttgtcctgatgtcactgtgtgccaagttgggggtggggaggcaagggaacagcacctgtggggctcaagccg

SEQ ID NO: 37024 - DNA, 120 bp, Homo sapiens
cggcggtctagggcgccagctctctgctgcccactgtgtcagtacctgcttattatagatcttcggtctcttggctaatggaactgggtcggagcggaactggaagctcaagctccaggc

SEQ ID NO: 37025 - DNA, 120 bp, Homo sapiens
gagcgcgactgctagagctcacacatgcgcagtgtgggcccagggccgggccgccgagcaggaagccggcgcagctaggcggccggcggggcctgttaattggcaattaggggggaggct

SEQ ID NO: 37026 - DNA, 120 bp, Homo sapiens
gtgcgcgtcagccgagaggagagcgtctgcccaccccctgctcccgcccccactcgggcggatggaagggtgggaggtgccctgcgttgggtggagggtggaggttgtagggtgggggtg

SEQ ID NO: 37027 - DNA, 120 bp, Homo sapiens
taccggctttcccttccggggtccggcgcccctcacccccagccgcggccatcccagccgggatgcccactggaccgggatgcccgctcgccacgcatggctgctctgggctaggacctg

SEQ ID NO: 37028 - DNA, 120 bp, Homo sapiens
cctcgcctcggggggaggtggaaatggggaaggccctaggctgggcggggacaggcccagtcctcctggtagagtctcctaggtgctgtggaggcagtgaggattccgggggctgctggc

SEQ ID NO: 37029 - DNA, 120 bp, Homo sapiens
aggcgtcagcctggggcggcgggagggtcctgggcactcgggatctctctaataattggtgctaatggcctgttgtatagtcttaacccgacgcatatggtttcataacacagtggctta

SEQ ID NO: 37030 - DNA, 120 bp, Homo sapiens
gtacgtggccctgaatgtgttgcagtttgatatatgaccccgccctgctccccggcctgggtccgaggctccgaggcggccccataagtgtgaatttctgtttataaacggcgacgcaca

SEQ ID NO: 37031 - DNA, 120 bp, Homo sapiens
acacgcaaacgcctacacacccaggcagacacacccggaggcgtgggggaacatattccagacgaggtccgagagaacctgggggccagacttaccttaatctaagccaagacaccccct

SEQ ID NO: 37032 - DNA, 120 bp, Homo sapiens
aatctaagccaagacaccccctctacccccaccctctcccagaggcgcgactgggattctgcgccaagtcccagtgggggaggggatcgctccacgatttcctgtttaaaccctgacccg

SEQ ID NO: 37033 - DNA, 120 bp, Homo sapiens
acccgaggggcgggcctgggcgaggctgaggtatttctcttaatcctagaacgacctcactgagtgtacccacagcgagatttggaggtgctagagttcgaggttggccgcttaacagca

SEQ ID NO: 37034 - DNA, 120 bp, Homo sapiens
cagcgaccggcgctctgttttcattttccactctggccaggggataaactggaccccagtggactccaacaccaactctctgcttcccagttactttcgattttctttcccttctccttc

SEQ ID NO: 37035 - DNA, 120 bp, Homo sapiens
tgacgtggtccttcctgcaggagagcccttctgtgattatctaataatagccagggtggctgagaatagaatctggctcaaggactctgcacacccggggcagagacactgaatctgtgg

SEQ ID NO: 37036 - DNA, 120 bp, Homo sapiens
atccgctgtatttcatgtgctggttcctagctaaggagaattgggcagagcaaaccctttctcaccctggtctgacagttgtgatcccgacagaatgcgaccttgtttggagaaggcgac

SEQ ID NO: 37037 - DNA, 120 bp, Homo sapiens
attcgctcaaacaccattttatgttcatgcaaaattttgttagtcctcactagatgagagtgggctcatggaggcaccgggtgcactgagcaggccctctgtgcatgctctgctggaaat

SEQ ID NO: 37038 - DNA, 120 bp, Homo sapiens
aatcggagtatgcgggttccagtaaccaatggatgccataaaggctttctcagaccttattgcttttgttgcccaagcagctggactggggaaatactaaatcccttctgctttctctcc

SEQ ID NO: 37039 - DNA, 120 bp, Homo sapiens
ctgcgggattcttttcacgggcatggtggggctgcaagcagttcggagtagtcagggccctggcgctggaagcctcactggagcgatgaagggatcagagtggttaataaggtggcctct

SEQ ID NO: 37040 - DNA, 120 bp, Homo sapiens
agccggccgctcaccccgccccagcccgatttgcctgcatccgtggcggcagattgggagttctctaaggtcccccaaatacccagatctggttactggatgaactgcgttttaatcctc

SEQ ID NO: 37041 - DNA, 120 bp, Homo sapiens
cctcgtcgctatctgagccaggacaagacctggtcagggagacggctggtccgggcagcacgggagaggacgctggacccgctgcctgtggcctggagcactgagtatgggctaccaagg

SEQ ID NO: 37042 - DNA, 120 bp, Homo sapiens
gagcggggctggaggggttttccgctactctctctaggtgatcgggttcctcccaagactcttgtccagacaggctgcaccaagaggtgtgcagctttcttccaccttcctcccgccctt

SEQ ID NO: 37043 - DNA, 120 bp, Homo sapiens
cctcgcccagcccacggcctctgccacggcgccgcagccgctcctgtttattgtgtctgtgagttgtttacttgttttgtctgctgccaccctgcgtcagaaacccgccaaaccagcgaa

SEQ ID NO: 37044 - DNA, 120 bp, Homo sapiens
actcgcccaggagaacaaagtgctgtgctatccccggactccctcccctttccagcaaccccctcctgccctcacaagctcctgcattctccctttcggaggggaggaagcagaaatagt

SEQ ID NO: 37045 - DNA, 120 bp, Homo sapiens
tatcgagatgcttttcgccggcttccatcactaacctcccggaggtcatcaagccaaatttatgagtggccgctcgagtcacgtgactctatttaaggctcccttatttgggaagagcgc

SEQ ID NO: 37046 - DNA, 120 bp, Homo sapiens
ccccgccatgagctcctacgtagccaattcattctataagcagagccccaatatccctgcctataacatgcaaacttgtgggaactatggatcggcctcagaggtgcaggcatccaggta

SEQ ID NO: 37047 - DNA, 120 bp, Homo sapiens
ctacggcggattggacttaagcatcactttcccaccgcctgcgccttccaactctctccacggggtagacatggctgccaacccccgggctcaccccgaccgccccgcctgcagcgccgc

SEQ ID NO: 37048 - DNA, 120 bp, Homo sapiens
ccgcggccgctccgggacacgctccgggcagagacgaagcggctcctctgaaccccgggatgtacagtcagaaggcggctcgcccggcgctggaggagcgagctaagagcagtggggaga

SEQ ID NO: 37049 - DNA, 120 bp, Homo sapiens
aggcgcagacagggcagcccgccggactgagccagccaccggccccgccacagatttacccgtggatgaccaaactgcacatgagccacggtaaactttaggacttcattttgcgctctc

SEQ ID NO: 37050 - DNA, 120 bp, Homo sapiens
tctcgggtccgcctgggttttataggccatgcggggcaaataaagaaaaaaaacctgcggccataaattttacgatccaggcatcaatggctcgtaaaactgtccactaaaaggcttaga

SEQ ID NO: 37051 - DNA, 120 bp, Homo sapiens
gtgcgcccaaatttacgacgacataattggatcataggaacaaaacgtgtataaaaggcaatattcaatttttgggggagagggagggagttaaaaaaatagagggatctgaagggtgag

SEQ ID NO: 37052 - DNA, 120 bp, Homo sapiens
agttaaaaaaatagagggatctgaagggtgaggagcgcggggctccagagcggggatccccccgcggctccctccctccctcccctgcggagccggctccgccggcgcttgcggctccgg

SEQ ID NO: 37053 - DNA, 120 bp, Homo sapiens
ctccgcaacagtgcgcaggtttatcagagctctccccatgcatggtagtcagctgttcctggtctgcccctcccattagactgtgaactcttagagggaggggctgtggaccatggctta

SEQ ID NO: 37054 - DNA, 120 bp, Homo sapiens
ccgcaggcgcggggcggggcgcacgcgggcaccgcccacgcgtcacaaagagcgggccggggcggggcctcgacagccgggctctcagggccctaaagtggccagagcccatccagatgg

SEQ ID NO: 37055 - DNA, 120 bp, Homo sapiens
tagcgacaattagtgaaaattacataaggactacataattacaaaggaactacccaaaagtaacaaatctatagcctccggtttagaaatcatctacaagtagcatcaacaagaaaaaga

SEQ ID NO: 37056 - DNA, 120 bp, Homo sapiens
agacgctattgagaaaccattccaaaacacacaactgcagaaaggttaccttagctcaagacttgaaatgaagaaacacagagaaagttttttttgtttctccaaaaggaaacaaaatct

SEQ ID NO: 37057 - DNA, 120 bp, Homo sapiens
tgacgctttcccgccagtatccataaactcttccaagtacaagtaactcagaacaaatgcaccccaatgttactgggaaacatcatcacaccatacacaaacaaactaaacaggactgct

SEQ ID NO: 37058 - DNA, 120 bp, Homo sapiens
caccggaccactttaccctgcatcctgtgggagggacggcacggtggttctccttgccctgtctgttccactataaatgatggatctggggaatgtgaggccaaaataaataaataagac

SEQ ID NO: 37059 - DNA, 120 bp, Homo sapiens
taacaaagtacgcctttaaatatttaaatagatgatgcatttcattgtaattgtagtttgtatcttttttaaagtgtctgttccctttatcacatttttgggctcagcactcagtctctg

SEQ ID NO: 37060 - DNA, 120 bp, Homo sapiens
tgacgtggggccgaggggcctcccctggcacacggggggcgggctggggctggtggggttcgaggggaggatgaagagccctgagcaggcggtgggaggggcagcaacagcagtggccag

SEQ ID NO: 37061 - DNA, 120 bp, Homo sapiens
cagcgcaggcctgcaagaagggagagagcgtggctgagacacaggcctactgtgggcctatgtgagggagggacaggttcacaccagaaacctccaggtttccctgtgaaagcaggtggg

SEQ ID NO: 37062 - DNA, 120 bp, Homo sapiens
aggcctactgtgggcctatgtgagggagggacaggttcacaccagaaacctccaggtttccctgtgaaagcaggtgggccttgggaagactcgcctcatttcccatcttccaaaggagga

SEQ ID NO: 37063 - DNA, 120 bp, Homo sapiens
tctcggcctcccaacaagagtttaacacctttaacccacagggctcctagtacccaacaggctcagagctttgtgaatgccataaaaagagaagattctggggttactcatgaaactatt

SEQ ID NO: 37064 - DNA, 120 bp, Homo sapiens
atttcacttgctcagttggctgtagtgcaagaaaattaagtgctttcctaactaacctccaacctttctttgggtctcaggtgtgtctcagcatcattacctgctgcatccggcggctgg

SEQ ID NO: 37065 - DNA, 120 bp, Homo sapiens
ggccggggttggggccgagccccacagctgcccccctcccctccctttttgtataatttaataaagaaatggtcgcgcttctgtttttaacctgtctcctgctttcccgggggctccagt

SEQ ID NO: 37066 - DNA, 120 bp, Homo sapiens
gtgcgacaaaagggtagagagggaggagggtggctgacctcccattctgccaggacccttccctttgatacaaaagcagcagcacactcctaccacccacgactcaagaagacaagatca

SEQ ID NO: 37067 - DNA, 120 bp, Homo sapiens
aaccgattccccagcactggcggcctttgagagcccccaggcacccctcccctctcccccaaccccagggtcaaaccagagactggccaggagggattgcagggcagtcctcagtcccct

SEQ ID NO: 37068 - DNA, 120 bp, Homo sapiens
gcccgtggaggagggcggtgcattgagcacatttctctcccttgcagttctgcccacatggtccaccccggtgcagccaatggccctgattgtgctggggggcgtcgccggcctcctgct

SEQ ID NO: 37069 - DNA, 120 bp, Homo sapiens
tgccggcaccgaagggtgagtaaccccacacctggtccccacaaggccctcaaacccctgagtcctctaccaggagatcctgtatatgggaactgattttggcccagctccctctgccca

SEQ ID NO: 37070 - DNA, 120 bp, Homo sapiens
actcgtaagttcccttgctgccctgtcccagatcccactcaagggagagacaggaaggagcagagagttaattccaggatagatggcctgggccatgtaactgcttctcctgtcgcagct

SEQ ID NO: 37071 - DNA, 120 bp, Homo sapiens
cctcgtgactccctttcttgtccctggacagcgccaagcagagcggatgtctcagatcaagagactcctcagtgagaagaagacctgccagtgtcctcagtaaggatctgggaggagggg

SEQ ID NO: 37072 - DNA, 120 bp, Homo sapiens
ctgcgctggaaaggccattggaggtgctagaacgcaaaggggttgcagtggggacagacctgctccccttcttctttgttcctgcagccggtttcagaagacatgtagccccatttgagg

SEQ ID NO: 37073 - DNA, 120 bp, Homo sapiens
gcacgaggccaggcagatcccacttgcagcctccccaggtgtctgccccgcgtttcctgcctgcggaccagatgaatgtagcagatccccagcctctggcctcctgttcgcctcctctac

SEQ ID NO: 37074 - DNA, 120 bp, Homo sapiens
ccccggcttcactggttgagtgttgctctctagtttccagaggcttaatcacaccgtcctccacgccatttccttttccttcaagcctagcccttctctcattatttctctctgaccctc

SEQ ID NO: 37075 - DNA, 120 bp, Homo sapiens
gtccgggatggtcctggaagtgagtatccccaggaagcaggacaggcctggtggaatctggtcagtctactacaccagatccctcattcaggcagctctgccctcctcaggagtcagggg

SEQ ID NO: 37076 - DNA, 120 bp, Homo sapiens
caacgtggcatctgagggtggggttctctgacatggagacaggctctggcccagtacctgcctcacattccctgaaactcctgtcctgagtctgagctgttgtctggatctttgggccat

SEQ ID NO: 37077 - DNA, 120 bp, Homo sapiens
ctacgtctgccacatcaagaaagaaggcaggtgagtgctggccacatgcgttttgaatggagaatggtggtgggaatgaggagggccatttggaagtccttgggatagctatgggagaag

SEQ ID NO: 37078 - DNA, 120 bp, Homo sapiens
tcacgctgcggcaggaaagttgagtcgttgtgtcagagaccagagagagagcctgcagaacctcaaatactatctggcccttgccagaaaaagtttaccaaccccctgcctccctggaat

SEQ ID NO: 37079 - DNA, 120 bp, Homo sapiens
gtccgtgacccttgtgaggttgtgaagctcccttaaggcacatggtggctgggctgtggatttggggtatgggcagagagtgtggagagcacttccaggggccatgtctgagagactaca

SEQ ID NO: 37080 - DNA, 120 bp, Homo sapiens
aaccggggtgacatagtgagaccctgtctcaataaaaataaaataaaaacagagtatcatataatgaggcacattaggagatgaagtttattcttcaggttgggaggctccaacccatcc

SEQ ID NO: 37081 - DNA, 120 bp, Homo sapiens
gcacgaaccgagcatccaccaccctaaactccagcttagatcccagttccttgtccactgacctaggtcctacagggtggagtgcagtggctcgatctcggctcactgtaatctcaaact

SEQ ID NO: 37082 - DNA, 120 bp, Homo sapiens
gagcggggtcacacagcacctctgcagtaaatctggcaaggcttggcaggccagtcctcacagtgtttctagggacactggaaccccgagagtcccccagaggccccattcctagcaact

SEQ ID NO: 37083 - DNA, 120 bp, Homo sapiens
cttcgagacctgcccaagctgcgagcgttggtgctgcttgataacccatgcacggacgaaaccagctaccgccaggaggccctggtgcagatgccataccttgaacgcctggacaaggaa

SEQ ID NO: 37084 - DNA, 120 bp, Homo sapiens
gaacgggctgaggctgatgtgattcgacagaggctgaaggaagaaaaggagcaggagcctgagccccagcgtgacctggaacccgaacagtcattgatctagcagcagttctagcctcta

SEQ ID NO: 37085 - DNA, 120 bp, Homo sapiens
tcacgcctggctaataaggctttagtgtatttatttatttatttattttatttgtttttcattcatcccattaatcatttccccataactcaatggcctaaaactggcctgacttggggg

SEQ ID NO: 37086 - DNA, 120 bp, Homo sapiens
gaacgatgtgtctgtatttcatgtggctgtagatcccaagatgactggggtgggaggtcttgctagaatgggaagggtcatagaaagggccttgacatcagttcctttgtgtgtactcac

SEQ ID NO: 37087 - DNA, 120 bp, Homo sapiens
gggtgggaggtcttgctagaatgggaagggtcatagaaagggccttgacatcagttcctttgtgtgtactcactgaagcctgcgttggtccagagcggaggctgtgtgcctgggggagtt

SEQ ID NO: 37088 - DNA, 120 bp, Homo sapiens
agacgagggacaaacaatactcttattgaatacacgtcagggaggagacagtaaaaagcacgcaaacacagtgtgttcagaatttgctgctttgaccccaggaggcaggtatttttgtta

SEQ ID NO: 37089 - DNA, 120 bp, Homo sapiens
cccctggggtttcttgccagctaccttgatcatcccacctgccatgtgattaccaagtgctcagacctacctttggagcctgtaggggaggagatttttcgaggtctggcccgaatgtca

SEQ ID NO: 37090 - DNA, 120 bp, Homo sapiens
atccgtttcaaaaaaaaaaaaaaagtgttttccttcttcatattggttctctgttatctagtcatgaaatcctgttgattcctcctttccagtctctctcaccatcactgtcaccatgac

SEQ ID NO: 37091 - DNA, 120 bp, Homo sapiens
ccacgtcttcccagcagtcctataccggggtaatcttccttcagctcctgctcagaaaccatcaatagctcccagctgactactcaacagagtcagcaatcctgtctgttctaccttcaa

SEQ ID NO: 37092 - DNA, 120 bp, Homo sapiens
ctccgcctctactgcttcccctggtctgagttgccactatctctggattattattattaatatatcattattatattcaatgtattatcattatatacttgcctcctgactgatctcacc

SEQ ID NO: 37093 - DNA, 120 bp, Homo sapiens
acccgcaggttctgtccctctgcccgggccccactgtcctctgactcatctctcaatctggcctctacccttctgctccagccccaaagctttcccttcctggaatgttaagcaggtcca

SEQ ID NO: 37094 - DNA, 120 bp, Homo sapiens
taccgtaccccagtgcatagtacagttcctggtacacaaaatttctcaaaaagtattagctgaatggccgaacaatgagtgaacaagtgctctgtactctaggcagtcaatacaatattt

SEQ ID NO: 37095 - DNA, 120 bp, Homo sapiens
tattcttaaggagcaaaatcaaacaatgatgttctatgctaagggctaactgtatggaatagccaatgttgtagaggttaaagagaaatcaatctcgaccacagtggtcgggagaagtag

SEQ ID NO: 37096 - DNA, 120 bp, Homo sapiens
caacgtgaataagatcctcttctctgtataaccttttccatggcatttcattccctccctgagtcagttatgataccaatactgtctcctaaaactctgtctttagcccagcttctttcc

SEQ ID NO: 37097 - DNA, 120 bp, Homo sapiens
ttacgactttatcctccagctaataagttgccaagtcattcattcatacattcacctattcaagtatttatcgagccttttctacaagccaagtaatgtgttaaactctgggtacactgt

SEQ ID NO: 37098 - DNA, 120 bp, Homo sapiens
agaagtgagcaccagacccaagtcattcagatactacctgtaagatataggcactgagggaaagagtctggtttttcttttagatgaagagctataagaatggaatcgagactaggagag

SEQ ID NO: 37099 - DNA, 120 bp, Homo sapiens
actcgccctctaccaggtggtgagtgacttctgtgccaaccctgatcccccatccctggtaactttttgggcgccaggacctccctgggacctggaatctggcattctatcacgaaagaa

SEQ ID NO: 37100 - DNA, 120 bp, Homo sapiens
aatcgcaccccataagggtttggaaggatgggtatgtcttctcgaagtcgacaaggccctaattatcaaagttctagaggtgaacaacagcttgaactgtgactgagacagtgactgcca

SEQ ID NO: 37101 - DNA, 120 bp, Homo sapiens
gggctgggtccggaagggatttatgtactgtgctaagtagcttggatcagatccataggcctgttgtgtatatgaagctgcagtatggggtacccagaaagaatacagatagatataggc

SEQ ID NO: 37102 - DNA, 120 bp, Homo sapiens
acccggaatgtctgtcggcgatgggtcagtattcctgcacagcaacactcggctggaactgagcagctgctgatcctttaaatggtgcatgtgcttgtttgttattcactgtcctcaccc

SEQ ID NO: 37103 - DNA, 120 bp, Homo sapiens
cctcgtaaggcagtaatgatccatggaaacattttgttaagaaggtgataggatgaaagtattatcagaagccaagtttgacttcagatttcaatatttcttggtaggttgggaaatgag

SEQ ID NO: 37104 - DNA, 120 bp, Homo sapiens
cagcgggatgcagggaagtaaagacatggtaactgtaagaatctgacttaaatgtccagatgaggaattgatggggcaattaaagttacgaggctgaaaactgggagagaacttgatgta

SEQ ID NO: 37105 - DNA, 120 bp, Homo sapiens
attcgacagtgacaggaagatgaaacaggataatatatggcagtatggtggtatctgggtcaagtaaaataagtttcttcctcattccttatttcctctcctccctttaagaagaaatct

SEQ ID NO: 37106 - DNA, 120 bp, Homo sapiens
ttccgaaggcaggttgccaaatcttggccaacctgaaaaagatttttggctactaaattgaaggagaccaaagagatatgaattaaatgcaaaaggtagtttctgaatattttcaccata

SEQ ID NO: 37107 - DNA, 120 bp, Homo sapiens
agttgatggttatagtatcgttctctagaagaatgtccttatttataacaattacatattaaattattctagggttcttgggcatcatgtcagtaaatgtttcaaagggaaaaaaaaagt

SEQ ID NO: 37108 - DNA, 120 bp, Homo sapiens
gtccgcaaatcactgatttgttctcctggggaccccttgactagaagttggccattttagcacttcctaaactactataggtcttaagatataataaaaaggaatcctgcaattttagtg

SEQ ID NO: 37109 - DNA, 120 bp, Homo sapiens
attcgtgtaattgcatccagagctccaaagtgcagaaataaaactatgagtcagtaatttccaggcaacagagaacagggcatgaaagaaaattttaactgcaattgcctttcttcctag

SEQ ID NO: 37110 - DNA, 120 bp, Homo sapiens
aaacgttttcctctgaccagatccattgttgctattggaagtgtggcctgttcaccctgtgctgtgtcctgcaagccatggtggggtgcaagggagttgtatggaattgtctgagtggct

SEQ ID NO: 37111 - DNA, 120 bp, Homo sapiens
taacgatgcctgttcacatatttacagcttcacgtaaatgattcagtcactgcgttgccatcttgggaaagagccaaggaagctttcttttcatctgggtatcctttgagtataactaag

SEQ ID NO: 37112 - DNA, 120 bp, Homo sapiens
tctcgagaaaatcctaaggaccccataggaaatactgagagtgcaaagttgggatttaacccagatctctctagggaacaggcttcaatttatttctattgctatggaaattccagatgg

SEQ ID NO: 37113 - DNA, 120 bp, Homo sapiens
ttgctatggaaattccagatggagaagtgaaaaatagaccatcttttatctaggataggaggcatctaggagtgtaatatttcgattggccaggaatgtattattttccagggtgatgga

SEQ ID NO: 37114 - DNA, 120 bp, Homo sapiens
gctcgggttttacaaccttggcacttgttcctgtagaggtttctgctccaataaattgtgtttttctctatttacttgtctgcctctacagttttgggggagtggttttccctgtgaact

SEQ ID NO: 37115 - DNA, 120 bp, Homo sapiens
attcgaagcttcttacttgtagtaccaaaaccagaggtcccttttccctctttggttcacaaaactctcctttgctgttcttatgggtaatgagtcagggctttgtctccccacagttac

SEQ ID NO: 37116 - DNA, 120 bp, Homo sapiens
caacgtctacaggaacagtgcctctggggagaggaaggggtcttgtctctttgctggcagttgcctaacacatgccagggtaagtcaacagcgacccactctcaggagcagcatggctgc

SEQ ID NO: 37117 - DNA, 120 bp, Homo sapiens
cttcgttgtcacttatctgaagtagggaggacaaaacctgttttatgactcccctacttgttttcctgggcctctgaccagacacagcaggctcttagggctttttctgtctgtactcat

SEQ ID NO: 37118 - DNA, 120 bp, Homo sapiens
gtactcattgtcagttacacatgctgagctgctttagtcctcgggccagattatacagaaagtaaagcaaacaaatgaacaaaaataacaaaatccccaaacttccaaatgacagtgaac

SEQ ID NO: 37119 - DNA, 120 bp, Homo sapiens
ttgcgttaaaagttttgaatttcataaagaaaatatggtaaaatctccatcaccaaggaagatgctattgctaataacttctcacctccttgaacaagacagaaaaatcctattcaaaaa

SEQ ID NO: 37120 - DNA, 120 bp, Homo sapiens
aaaattaaagatactgagttaggctgagaagagagtgaatgcaaactaaataatccaatgtgtgtgtacgtgatcattttataaagcaggaaacatgctctgtgaatgagagcatttgtt

SEQ ID NO: 37121 - DNA, 120 bp, Homo sapiens
gtccgcaaactccaaggaatgcacattaatttatttcttctcttaccttacatctaacccatggaagtacttgatatattgctgaaaaaatatcaaaatacgaaaataccactgcttctt

SEQ ID NO: 37122 - DNA, 120 bp, Homo sapiens
aaacgagggtttgttaagtgcccttgctgggtcccaacccccagagattccgattcagcaagtctgggatgcggcttgagaatttgcatttctaacaagtttctaggtgatgctgatgtc

SEQ ID NO: 37123 - DNA, 120 bp, Homo sapiens
taccgtttgagaaccgctggattgattctttgacagtttttgaagtccgctgctcaccatatcacttcatcctcttataaactttcactatgtgattgcctaagagcccctgcttgttgg

SEQ ID NO: 37124 - DNA, 120 bp, Homo sapiens
gaacgtgtgagctcctcactgaaggctgcctccagaattccctgaatggactgccttgctttcttcctaaaatctttccccaagagggcataaaggaagggattaaagcaactattggca

SEQ ID NO: 37125 - DNA, 120 bp, Homo sapiens
ccacggccactcgaaaggttttgctctgagacttggcgaagcggcccctttgcattcggaagacaatgaagctgtaacaggctatcatgataacagagggcagcaggaaacccaccacta

SEQ ID NO: 37126 - DNA, 120 bp, Homo sapiens
gatcgttattgccacgaggggtgttggcacttgatcgtcatctgtgaattggcctaaattgtaataatcctggaaaccttgtggtagctcagactcgtagaaggaattgctagaagcgct

SEQ ID NO: 37127 - DNA, 120 bp, Homo sapiens
tttcgtgatcttcaataggaaacccactggggattttaggtgagaccacatcagcaggtttaaatacattagaatacagattttgacttgttaacctagcagaacccctagggagtgaat

SEQ ID NO: 37128 - DNA, 120 bp, Homo sapiens
gatcgtgacgatgtatatatgtctttggaccaaccacataaatgctataggcttttggtgatttctgaagttctttgcatctctaaaattcttttactccttgtgacatcattacataat

SEQ ID NO: 37129 - DNA, 120 bp, Homo sapiens
tgtcgaattggggtctataaatatacctacattctctcctatccatactcagcactctcatgcatatatgacctagctccatgtaactatccagctgcattctgtcatatctgtttgtga

SEQ ID NO: 37130 - DNA, 120 bp, Homo sapiens
agacgtggtccccatgctcaaagaagttagaatctagttggaaagacacacagcttctaatggtgctgtggatgctgccatggtagagaaatgtacatgagttttcaaactttcctaggg

SEQ ID NO: 37131 - DNA, 120 bp, Homo sapiens
cttcgtcccaattgcagtcaaattcaatttataacttagtaggcagttacagccatcagtggcatcgggttctagccaggccacttgattccccaagagtcagtccagcgtctccagcta

SEQ ID NO: 37132 - DNA, 120 bp, Homo sapiens
atccgtgtgactatctggggttggatttagtcagagagatctggcccagcagttcttaagccagaggcagccataagcccacagctccttacccaaaacccctggggccaggtgtgttgt

SEQ ID NO: 37133 - DNA, 120 bp, Homo sapiens
gtacgtgatatcagctctcttggaaataactgtccctttaaggagtaattgtcttgagtaacccctaaggaagtattaagtattaaaattctagggccggattcaccatcccctaaggat

SEQ ID NO: 37134 - DNA, 120 bp, Homo sapiens
acacgtatctcttgaacacctcatctcctccaggttggatgggtccgcaaggcactagctggggacccttccgtgatgtggacacagtgatgtggaccgtactctgcacagggggcccgg

SEQ ID NO: 37135 - DNA, 120 bp, Homo sapiens
gtgcgcggtactatccacatatttcctgagtgcccctgtggtccagaggctgctggagtggagccctgggaagcgccctctgagcccctctagtttaatagcctaaggaaggagtgggga

SEQ ID NO: 37136 - DNA, 120 bp, Homo sapiens
tttcgagagtattttggtcttggaacagaggtcatttcagaagaaagggacagcctgcagaaggggaaggctggagaagttgggggcgtgtaggcagggtgccgcagtgtcctcagcagg

SEQ ID NO: 37137 - DNA, 120 bp, Homo sapiens
gaccgtcttccctctagctggagcaggaggagctgccctagggggcaaggcctcccagggccacagaggtcaagaaaggcttcgtgaaagagctgagtcttgatggaggagagcaagtcg

SEQ ID NO: 37138 - DNA, 120 bp, Homo sapiens
caagcgggaacaaagcgcttggaaaatggggagagccacaaggcgagcgggggcggtgggggtgggggggcgtaggcgaggtgtttgcctgtggggtgggcatcgatgtaaggctggaga

SEQ ID NO: 37139 - DNA, 120 bp, Homo sapiens
cagcgtgaaagatgctcattaaagaagacaagtgctgtggagagtcagaggaaatgtgatgattttgtctaaaacgcatctgggctttcctggagcctctccctgccggctgctgggtag

SEQ ID NO: 37140 - DNA, 120 bp, Homo sapiens
ccacggggaagttgggtgggacccctcccgcccttctcactcctgtccttcagctggagcctgcagggcacacacatggcgccattcattctggtatcttggtgctcttgcttttcctct

SEQ ID NO: 37141 - DNA, 120 bp, Homo sapiens
ctacggcattcttctttctctaacctcgtgttatgcttctgatataccaaataggattaaagccacataaggaatctctcagaaccagagattaacttctctggacagaagctgctggcc

SEQ ID NO: 37142 - DNA, 120 bp, Homo sapiens
attcgaactctcaggcaaacccgtggctccccacaggctgggccaagggcctaagagtagtatatagcctcccaaaggcatgtctctcatgtttctggcttgggttgttgatggtatttg

SEQ ID NO: 37143 - DNA, 120 bp, Homo sapiens
aggcgtacaggtgacaatgactggttggagctcaggagacagagcagggctggaggacacatggagagttagcagcactggcattctgtgtgtgggaagttaaattgagttgcccttgct

SEQ ID NO: 37144 - DNA, 120 bp, Homo sapiens
tgtcgccccaggcaggatctgggagccgagggaggttatggatgagaatgacacacagggttcggggatcgtggtctgggccacccagatctgcccacatgtggaacctcagtgctgggt

SEQ ID NO: 37145 - DNA, 120 bp, Homo sapiens
aaacggaggtgggtggcttatatttgctgaaggaaggacagtcttcaggggatggctgctgggctgggactccagattgctgactgccaaagctgctcctgcattttcctgccaggagag

SEQ ID NO: 37146 - DNA, 120 bp, Homo sapiens
catcgagcaaagtgtgagaaatatggttgttgacaattggcaactaaatctttcagtctaatcacagaaaactgaaacctaacctagcgctttttcataataccctggccctgctccatg

SEQ ID NO: 37147 - DNA, 120 bp, Homo sapiens
gcacgtgcacagagatgactaaggagaccaagctagacactatgtgctcatgcccttggtattgtcaggcctgctgccagagaggctttggagaggggcttagagcttacgagactactt

SEQ ID NO: 37148 - DNA, 120 bp, Homo sapiens
aggcgccaagagcagcctctcaggcaacccagagcaaaaaccaagtgcttttccaaaccaagggcaggcaactgatttgttaatttcccactgtgaaattcatcagaaaacctctcacta

SEQ ID NO: 37149 - DNA, 120 bp, Homo sapiens
tcacggcagagtccttaactgcctaccttgttcctgttgttaagtccggttccccaaagataagtaaaaccaacttgcccgatccatggccatgcatctgttctcagacataagagggat

SEQ ID NO: 37150 - DNA, 120 bp, Homo sapiens
aaccggaaacaaattcatcttcattagtgcttcttacccagatttctaaggactgggaagcatcccagtggtggttactggaggtgaccagccatgaacaaagcgcctggcacttgaatg

SEQ ID NO: 37151 - DNA, 120 bp, Homo sapiens
aaacggacgatagccattaatcatccaactgtgcagaaaaagttagcattctatctagagctgtgttttactgatgtttggtagtttttttcttttgtactatgactcacaatttcataa

SEQ ID NO: 37152 - DNA, 120 bp, Homo sapiens
caatgtcactcagcttcagtaacacgtaggatcactggctagttttgatctgagacttttaggtagaatacatgtaaactgacagttcaaggaggtctctaaaacctaaggcattccttc

SEQ ID NO: 37153 - DNA, 120 bp, Homo sapiens
ttccgttttcttaccatgtgcagtaatgatggataaaaacaatactgttgataatacgttgcagcaacactgcattctaatgggttaggtactctgttttataggtaagagctatgtgct

SEQ ID NO: 37154 - DNA, 120 bp, Homo sapiens
taccgacacaaatgggaattcagaaaagaaagaacttagcgggcactgggatgaatggccgtagaaggccacaaggatgggtcgtggaagtgggactcgaagggtggaccacggctggct

SEQ ID NO: 37155 - DNA, 120 bp, Homo sapiens
gggcgacagcatgagcgaacccagtgtgggagaaaacctcatagcctggtggcaggggaggtgcagagggcagacccaatgagaacaggaaggctgggccggtacaagaaataagtggag

SEQ ID NO: 37156 - DNA, 120 bp, Homo sapiens
acccggggaattactgggtcagggagaatccaggtatagtagagcagggtgttagcagcaaagacacttaagagaaaaaaaaaaaatagcaggccaccggagaaagtactcattaacaga

SEQ ID NO: 37157 - DNA, 120 bp, Homo sapiens
gagcgagatcttgtcttaaaataacaacatttttgtcaaaaaaatctgcaagttaagttctttcatggtgatcctcgcaaaatagcatttctcatccaaaggcctcagaacagccgccag

SEQ ID NO: 37158 - DNA, 120 bp, Homo sapiens
agccgccgagctaactcgggaccctgttaccggctgcttggcgccctggtcgggtgggttttaccttcttcagggtccattcctcgcctcgccccccgttcccaaccctcgggacactgg

SEQ ID NO: 37159 - DNA, 120 bp, Homo sapiens
aaacgggtttgctccaggccgcactccatccccgagggaaagctccccagaagttctggagttgggctgaaggatgtgatggcaagatgtgaatgatgtcagaatccccatctccagagt

SEQ ID NO: 37160 - DNA, 120 bp, Homo sapiens
gtccggctggggagctaagcgcaggtgagcttacatcagaagagaaagccaaaccccccacacgtcgctaaactagggcacgggaatggcgtgttatgcaacggccgccgttcgcgtggc

SEQ ID NO: 37161 - DNA, 120 bp, Homo sapiens
ccacgaaagcgctcctgcgcctcgggccgcgtcccgccaagaccgtgagcaaactcgcagagttggcgcggcagccggccgggagacgccgagcagggcctggccgcccgcagcccggga

SEQ ID NO: 37162 - DNA, 120 bp, Homo sapiens
gaacggcgcccccagggtccggtggcctctgaggggctgactggcccgtgagccggcggcgcggccgcggggaacggggtgggaaccgcgcggcagtgggtgaggcggcgcagccaccgg

SEQ ID NO: 37163 - DNA, 120 bp, Homo sapiens
cagtgggtgaggcggcgcagccaccgggggctgaggggcggcgcggcctcgactgcggcaccgccgtgggtccgtcggctcgcgggacgacggggcggccggcgggggccaacagggcgg

SEQ ID NO: 37164 - DNA, 120 bp, Homo sapiens
ctgcgacgagaggcctgtaggttttgggcgcccaccctgctaccgtagaatggttcttggcaatagatttctcaatttccttctccagtttaattttttaataactgagtacagttaaaa

SEQ ID NO: 37165 - DNA, 120 bp, Homo sapiens
tcacggaaggtaaggccatgtcaccacatccccagtacagggctggcccggcatggtatccgcaggaaacagtgatcgagccctccttcctcctacgtccccaccgcatcctgggcaaca

SEQ ID NO: 37166 - DNA, 120 bp, Homo sapiens
aaccgctgagtatttgtatttttcagggaacctcaggagacataaagcctttaaggtttaaaggactgaatctcttccggtgcaatttctggaattataagtatatttttttcctttctt

SEQ ID NO: 37167 - DNA, 120 bp, Homo sapiens
atacgtatgttttgaattccaggcatagcgctagccatggagaccatagtggtgggcaacgcagacacgaccctgtcgtcacaaaacttaaagtttaaagaagacagactaataaaataa

SEQ ID NO: 37168 - DNA, 120 bp, Homo sapiens
aaacgaatatctgctgcgaagcagtaggaagtgccctgcggtctgtttcccctagcagagactggccttgtggcggaagacccccgcgcgtagggagggccggtgcggcgactccgggcg

SEQ ID NO: 37169 - DNA, 120 bp, Homo sapiens
gggcgcgctgttggtgtccagggcgcggagcctgcgccagcttcacaaaagcggtgtggacgcctgagccagtccgctcttgctggacggctccccatagtttagcccaaaaatccccct

SEQ ID NO: 37170 - DNA, 120 bp, Homo sapiens
acacgccccgaggtgctgctttggcagagaagccctgtctgcgagccccgaggcggagatggctccccaagcctgatgcagacaagagagcccgcccctcccctgtcccgcacctgctga

SEQ ID NO: 37171 - DNA, 120 bp, Homo sapiens
aaccggcagggagctctgaagtgggcagttccaccccatctcactcaggcattgtgtgcaagctgcaccaggaagggtgtgaccttgggtgatatgagtcatgcagaaagtgctggaagc

SEQ ID NO: 37172 - DNA, 120 bp, Homo sapiens
atccgtgtgatgtggtggtctaatagaatattaattacaaagaaaaactgtacctttatagaatggagaaacatagcacacactaccttgggtgttgatcaacattaatggtccccaaaa

SEQ ID NO: 37173 - DNA, 120 bp, Homo sapiens
acccgaccaaatcaaccaacaaaaccaagcaagagaaatctgatggtgaagtggcgaggaagcagcaaaagcttcttgcagctggagttagggatgcggatgaaaggtggatcaagccaa

SEQ ID NO: 37174 - DNA, 120 bp, Homo sapiens
cttcgccctctcttccactgctgcaacgctttttaaagcgacagtcacacgctgcaggattcggaagcggaaatggtctttgctcattggatgacaatctaaattcagatcgaaagaatg

SEQ ID NO: 37175 - DNA, 120 bp, Homo sapiens
ccacgtgctgctcgtttctcttcttatgaagcgtctccctgtctctctgggcctgtctctgtttcttccatcgcttttttccccactaagtaaccatcccggcgcactgtacccaactgg

SEQ ID NO: 37176 - DNA, 120 bp, Homo sapiens
ggtcgaggaacgcccctgctgtacccatcactgctggctgcctcggagattaatgcgagcgactcgggtggtttatgagaagtgacacttaatacccagcttcttgtatctgccgccgag

SEQ ID NO: 37177 - DNA, 120 bp, Homo sapiens
taacgttaaagcccgctctgtaccaccgcggatgtgactgctgtaaataccacggggcagggctctcatgcttcagaaacacgtaagcaagacgcaccgagccagccccggacacccaat

SEQ ID NO: 37178 - DNA, 120 bp, Homo sapiens
ctgcggcaaagggggggtgggaaaggaagaggggaggaccactcgctcttctctccttcctcctcgcccgggccggagcacgccttcctccccggagggcaggggaaggtcgctccaggt

SEQ ID NO: 37179 - DNA, 120 bp, Homo sapiens
ggtcgctggcacctccagcgcccccgaaatctgcaaattcatcgctccctttcgtcttcaggcgaagccctcccgtccggagtagggccagccccagttatgcatctccagcctttagct

SEQ ID NO: 37180 - DNA, 120 bp, Homo sapiens
aggcggatccgacttctcccccataaccaggttttgattcgcttccccaccgcaggggttcagtctctgctttcgactttgcttctcagttgcacgccccgcagtgtggagctgcgctca

SEQ ID NO: 37181 - DNA, 120 bp, Homo sapiens
tctcggcaactttcaccatcttgacccgagagtcgggccgtttctaagacaatgtgaacaaagaggagcagggggagggaaggggggccccgcgggagggctgtgggcgagtgtgtgtgt

SEQ ID NO: 37182 - DNA, 120 bp, Homo sapiens
gtgggcgagtgtgtgtgtgtgtgtgtgtgtgtgtgtgtgtgtgtgtgtgttggggggcgccgcgctccgcgcccgccgccactggggatccgggcgcaggcaggctgtcccgggcgcaga

SEQ ID NO: 37183 - DNA, 120 bp, Homo sapiens
tcccgctgggcgcgaaggccgccggcggctaacagaaacccgagcccgcgcaacggagctcaggcttccacgtgcggccccgcagggcagagcaggaaggagcggctgcagccccggggc

SEQ ID NO: 37184 - DNA, 120 bp, Homo sapiens
gggcgccccgcaagcatccagtgcccggccctcccagctccgcggcgggcttcggacggtggagtgagacaccagaactcgcctttcgcttccccgagccgatgcacggcttgggatggc

SEQ ID NO: 37185 - DNA, 120 bp, Homo sapiens
tggcgccgctcgtcctaagcagcgtggtttgagggcgagaagacgcctactggagcgctcccctccacccagactcccgaagacgcgcgcccgagtcgaagtcggggacagagaaggttc

SEQ ID NO: 37186 - DNA, 120 bp, Homo sapiens
tggcgcccccctgccgactgctttgcggccgccgggacccgagcagcggggcgggacctaaacatagccccaacccaaagatgcccagcagaacgctccaaacaaaacagaaacggtggc

SEQ ID NO: 37187 - DNA, 120 bp, Homo sapiens
ggccgcatctgcgtgtgtgtgtgtgtgtgtgtgtgtgacgggggagaggagttgatcttacctgaaacatagtttgcgcttctgtgtgtgtggccgaagaatggaagagaaactgccatg

SEQ ID NO: 37188 - DNA, 120 bp, Homo sapiens
atccgagtccattaaatcaactccccttccctccgactctctcaactcagtcatattctataatacaacgcaaggttacagagccccagtgaaaactagtttcccagtttcactctgacc

SEQ ID NO: 37189 - DNA, 120 bp, Homo sapiens
gtgcgtgggcaggaatagacttgtcaccactgccatacagctgcacatcttgccgacagtccagtcatggagtcccagtcaggcaaagggcaatgaaagaaagggtaaaatggctcttct

SEQ ID NO: 37190 - DNA, 120 bp, Homo sapiens
ttccgtgtgtgcttgagaagcacacatcttctctcgtgaagagtgcccaggcttggaaactgctccaaggaagggtggctgtgagagacacttttccgtattatgctttccttgcggaaa

SEQ ID NO: 37191 - DNA, 120 bp, Homo sapiens
aaacgtcttcagctgcttccttgccttcctagtcttctgtctccaatccattctccacactgatggcagaagtaccttcaaaacccagacaggagtgtcacttgtgcacagagatccctt

SEQ ID NO: 37192 - DNA, 120 bp, Homo sapiens
cagagatcccttcaaattcttgcttttgaaggatacagcccacgttctttaatgtggcacccaatgcttaggatgaaccgctgcctggatctgctttgccaggagcaccctgtgtgcctc

SEQ ID NO: 37193 - DNA, 120 bp, Homo sapiens
cctcgtgttaacaggaagcataaggtggggatgggcagggggcttaacaaggtatttatcacagtgattgtgcccaggggtttctcccgtgattgcttcataaatttgagtaatctttcc

SEQ ID NO: 37194 - DNA, 120 bp, Homo sapiens
gttcggcaggcagtacattaatgtggatgctaaatatagctggaaagagcccagtcccggaggctccagtgcccactggcaggcaggcttctgccagtcaataacctacttttgttccag

SEQ ID NO: 37195 - DNA, 120 bp, Homo sapiens
tagcggctatttatatctggaaaccattctgaaagttgttagaaatccttcctgcggcagcgtgctgccctcccaggagctgctgaagtgtaaatatgcagcgaggcattcttcccagca

SEQ ID NO: 37196 - DNA, 120 bp, Homo sapiens
cagcgcctggctgcactgagtgaccttgatgggctccatccttcctttgaaaacaaaaacaccaacttggaattttaattaaaaggcaggcagtgggctatcgagcttggtgcgttggct

SEQ ID NO: 37197 - DNA, 120 bp, Homo sapiens
catcgcaatgtggatttgaggtcaccattgtgaagcctgtaacactaacttatcgggaaaaacacatcagctgaacttatctccaggtttgccaggagccagaggctcagatgaagaact

SEQ ID NO: 37198 - DNA, 120 bp, Homo sapiens
gcccgccactgagggagtgaagggagccccgcaaatagtactctttctggcctgcacctatgtggaatctattggtttaatgtcacagagcaagttgcctgtgtggtggtgacatgaaat

SEQ ID NO: 37199 - DNA, 120 bp, Homo sapiens
ggaatctattggtttaatgtcacagagcaagttgcctgtgtggtggtgacatgaaatggctccgtttggttcagtgatgatctcggaacactagtggttcagctttagaactggccataa

SEQ ID NO: 37200 - DNA, 120 bp, Homo sapiens
gggcggtgccggatccccttgggcgggagcagcggggagccccttcctgccctggctgaacaggtcggctgtgccctgtgctccagcgctctctgcacctcatggcccttctgccggctg

SEQ ID NO: 37201 - DNA, 120 bp, Homo sapiens
ctccgcgtgcacacgccaggcggtggggcccgctccttcctgcacagcaactctggcctgaatgagccccatttcccgagagcagcagggccctctgcctgaacttctgaactgctcaga

SEQ ID NO: 37202 - DNA, 120 bp, Homo sapiens
aggcggaggcagaggcgcatcccctcactcggaaggccggggccgtgtcctggctcctgacgccctcctgcttcgtcttctctgccatactgccacagacactgggaggtttgttccctg

SEQ ID NO: 37203 - DNA, 120 bp, Homo sapiens
tcccgcccctcatggccgggcacggctcacgcctggctgtggtcggcatcctggccaccatctttcaccacctcccgcgttttcttgggcgtggacggcctcatggcatggccgccgcct

SEQ ID NO: 37204 - DNA, 120 bp, Homo sapiens
ctacgtttccttttgcagctcagcagcgggtccggtgttttagagaggggggccttggggccactggtctggctgttggggccaggcggtgaaagtgggccctgggcagcctgcgagcag

SEQ ID NO: 37205 - DNA, 120 bp, Homo sapiens
ggccggcagggtagtcttggaaatgcccaagattgcttccgcgcgcgtcagttcagcggacgtgtctgcctggcacgaggaccgttctacaaactcgttcctggaagccgggctcgctgg

SEQ ID NO: 37206 - DNA, 120 bp, Homo sapiens
aggcggagctttggtttccttcgggagcttgtggggaatggtcagcgtctaggcaccccgggcaagggtctgtggccttggtggccactggcttcctctagctgggtgttttcctgtggg

SEQ ID NO: 37207 - DNA, 120 bp, Homo sapiens
tgccgcagctagtacacctggatggcctcctcagtgccgtcgttgctgctggagtctgacgcctcgggcgcctgcgccgcacttgtgacttgctttccccttctcagggcgccagcgctc

SEQ ID NO: 37208 - DNA, 120 bp, Homo sapiens
ccccgcttttattctgtggtgcttctgaagggctgcagggggctgctggcttcgggctgcccttgttctcctgcttggtcgtgaccctggacttgaggcttctgggctgcacgttcgtct

SEQ ID NO: 37209 - DNA, 120 bp, Homo sapiens
aaccggggaggtttgcgaaaggcgaactctttatgggcgcccttcagaccctgccgatgcgccacctttgcggctagctcttcgtgggatttcaagagtgacttggtcgaattttcgttt

SEQ ID NO: 37210 - DNA, 120 bp, Homo sapiens
ggtcgcatgctatctcttctcattcagaagctgttctatttccgccttaatgctctgctcgaaggagtcgttgctgctcgctctgaccgggaaggcagaaccctagtcctcactggatct

SEQ ID NO: 37211 - DNA, 120 bp, Homo sapiens
agacggctgctgtgggctttaactggcagggattgggataggggaaaagaggtaatgtggacaagagccttttagacccagacagacctcagcctggtccagctggcgaattctttgtat

SEQ ID NO: 37212 - DNA, 120 bp, Homo sapiens
ccccgggtgtgctgggagtgagctgttcattcagttttgtctttccactgtggtttctagttggtccaaagcttcatggtatttttttcattcccttggcaaacatttttttgggaggcc

SEQ ID NO: 37213 - DNA, 120 bp, Homo sapiens
agacggcccctctccatttatagcttaagcaaaaggtagagaagctttgctctggtaaaggtgacagaaggggctggctcagtgattcttcaggaagcagggccagcagagtgttttgag

SEQ ID NO: 37214 - DNA, 120 bp, Homo sapiens
ccccgaggttattggcctgggtacttcagtggccagcatcagtgatgggcagggagggtgtgcatgttgattttgaggtctttctctgcatgatatccctctggaacttattttatattt

SEQ ID NO: 37215 - DNA, 120 bp, Homo sapiens
tttcgaaagttgatttggcttgcagtcagaggccattaattaggggcaagaagatgtttggtgtttctgtatttcagctgtctctgggttaaccagggtcagggtttttctagggacagg

SEQ ID NO: 37216 - DNA, 120 bp, Homo sapiens
gggcgatgataccatgcaaggcaggactcccagggcagtgactggattttagacagggcaggataacctggatggtctcttcatttacttggtttaggcacgtttgtatttactcatttt

SEQ ID NO: 37217 - DNA, 120 bp, Homo sapiens
acccgccatgtgctggacactgctgtctatcccaggttcgttttataccttggctaacctgtctcctcgatctcgtggtcttcctgtctttcaagtctcagtttgggcctctcacgaact

SEQ ID NO: 37218 - DNA, 120 bp, Homo sapiens
gcacggtcctggctgcagatcggtaaatacaaccaaatggcagagcattttttctgtaatagactcctaacctaacgggtggggtggtgtttgtgccaaacgtcagggaggacggtgctg

SEQ ID NO: 37219 - DNA, 120 bp, Homo sapiens
ccccgcagcaggaattattgaccgtcctacttttacttaggattgatacctcccttctaaagtagagctgtcatggaaagcagcatgtgataccagtgtacatctcttatcccttcaaaa

SEQ ID NO: 37220 - DNA, 120 bp, Homo sapiens
ccttgaggcagtttcaaccattttttatatcctccctgtgtggtgctcagcaaatactgaaagcacgaatgactgtgacagcaaatactgctctgaaggaagcagtctataaaacaggct

SEQ ID NO: 37221 - DNA, 120 bp, Homo sapiens
attcgggtttgaaaactcaggactgtaataaagacacaagacaaattcagtagtcttcccaaaggctgcaggcaggtgcacagcccagcctccctcatcagtcagtcagatggcagcagg

SEQ ID NO: 37222 - DNA, 120 bp, Homo sapiens
ggacgggagagtgagaccctgtctcaaaaaagaataaggaataatgtggaggttatggtagtgttttgttttttaaatggaccctgaggctgttgacgattccttgaaatatgtttggtt

SEQ ID NO: 37223 - DNA, 120 bp, Homo sapiens
agtcgtcattggcttctcacgtttgagagtgaaaggaaaatgagctgtaggttagactccgggctgtcccaggtggaatccttgacgatgctgtgggtggccttgcagcctttgactgtt

SEQ ID NO: 37224 - DNA, 120 bp, Homo sapiens
ctacgctatgcaaaagaaaccctaatttttgccttataaataataatggacctttggggaaatagagccaaatacccatttagtgagggtggggtatttggctctgtctccctgaagaat

SEQ ID NO: 37225 - DNA, 120 bp, Homo sapiens
cctaatttttgccttataaataataatggacctttggggaaatagagccaaatacccatttagtgagggtggggtatttggctctgtctccctgaagaatcgtttaacgatttgtcattg

SEQ ID NO: 37226 - DNA, 120 bp, Homo sapiens
gctcgaggttgcattgatgtgtcagggctaaccgaagctagaatgcaggggaaagaggcaactatttggatgattatatttgaattaataacccaccaacctttaaaatgcatgattttt

SEQ ID NO: 37227 - DNA, 120 bp, Homo sapiens
tgacgaaaaccaggagtttcagtttggctggtgcaagtcatttgggattaaggagagagaactgggggcatggttaagatctggaactgcaggctgctttgtctcttcagttaggagtca

SEQ ID NO: 37228 - DNA, 120 bp, Homo sapiens
cctcgctgctgatttagggcaaggcctatcttctgagtcttggcttttctcatctgtgaaaagaggggcttaggcctgagtatttccaaggacccttggcagccatatgactggactcca

SEQ ID NO: 37229 - DNA, 120 bp, Homo sapiens
ccacggtgggatatttgcagagaggcttctctggagctgctgcttgtgggctggcaccaaaactggaggcagagggtgccagctgtgttgctgcacagagcctcaggagcatgaaccctg

SEQ ID NO: 37230 - DNA, 120 bp, Homo sapiens
atttttccctcctcctgctttgtcacctgaaccccagcagtgttgttcagtgccgggaggatgtcgctcacccgctgacacggctacctgcactgacacatgtcatttgtgtcttctctg

SEQ ID NO: 37231 - DNA, 120 bp, Homo sapiens
taacgaaattgtactttgcagcaaggtggggtgtggccacagagctctttaaagatgggagcctggaggcgggaggttggctaattgcatgttgccttttggcttctttccagtctttaa

SEQ ID NO: 37232 - DNA, 120 bp, Homo sapiens
ctacgccagatgtcagcctgcagaggctgtgattccaggcttcacttggttgaagtgaccagtctggccagctttgctaggcctcctctttctgactcactgttcccatggatctctgga

SEQ ID NO: 37233 - DNA, 120 bp, Homo sapiens
ttacgtgtctacgaagagaagcagcttatttcctggggtgaggcatgcccagagaagatttacttctcaaaaggcctacttgaatgtagttcacaagcctggctgtgcctcagcatcacc

SEQ ID NO: 37234 - DNA, 120 bp, Homo sapiens
acccgtacagcttaaaaagaaattacacggaaccacatctcctagagtttccctttcagataaggattggaatgtgtattgtaaaagagctccacccgtgactaggatgggtgtcaggac

SEQ ID NO: 37235 - DNA, 120 bp, Homo sapiens
tcccgtcttggagcttatcaggaatgcagatgcccagattctaccaggcttcttgcatcagaacccactgtttaaaggatggagaagccctgctccaatatggcatgtggtatgatcagt

SEQ ID NO: 37236 - DNA, 120 bp, Homo sapiens
tcccggaaatggaacattgaccttatgcattgatggctgtggtttaccaatacctatgctcctaagaactgggccaacatctgcatagatccaatttttaaaaattataatgtgaatcgt

SEQ ID NO: 37237 - DNA, 120 bp, Homo sapiens
gatcgcgaccaacttctaagttgctttgccttctattgtccattatacacacatcaatggcattcatttaaatatacttaatttgtaaaatgagctgtgttctgtaggcagataggagta

SEQ ID NO: 37238 - DNA, 120 bp, Homo sapiens
agtcgtgcctccctcccctcagatggaggtaatttcttcctcctctggattatacctgtcccttacatgtgtgactgtgattgcacttgccctgtgtgttggaattttttgttgacattt

SEQ ID NO: 37239 - DNA, 120 bp, Homo sapiens
acccgtgggaatgaggccctttttattcatagctgcatcccctgtgtctaagagggcatacttaatacatagcagagattcaataaatgttcgctgagggagtggatgaatgagtggggc

SEQ ID NO: 37240 - DNA, 120 bp, Homo sapiens
ctgcggtggttaacctttgttctccctgataaaagagggggcaggatacctttcttctttgtaaacacatatcctgcttttaggcagatacagggagagcagagaagctttcctgcattt

SEQ ID NO: 37241 - DNA, 120 bp, Homo sapiens
aggcgagttgttaagagagctctaaatagcctcttctggggattgctgcattttactaggatcaccgaaaattgaggcgggagagcttgccaagaaaacctctcccagttctgcgtgggc

SEQ ID NO: 37242 - DNA, 120 bp, Homo sapiens
cagcggatgtggactgagcctagaggaattgtggtaaggaagccttgtttcatggtgggattatcaatgttgtccccaatgttcagctacacccttcctactcttcatggccaaattgga

SEQ ID NO: 37243 - DNA, 120 bp, Homo sapiens
gctcgtgccacctattctgcaactatctaatagagggtttggtcttccacactagctctgaggtagcactgttgccatagcacctgacatatactgagtgcttattttaggcaaggctct

SEQ ID NO: 37244 - DNA, 120 bp, Homo sapiens
ccacgtacctggtccctcttttggtgggggggtgtgctttatcttattatccagatgaacttgcaaggtcattattacctcccagtttccagtaaccttctgtggctgtcctaatctttg

SEQ ID NO: 37245 - DNA, 120 bp, Homo sapiens
cttcgtaatcttccaaccactgaactagagttccaccaaatagaatggctcagttaccaggaagaattccactggccagaattggcctatttgaccgagaccacaccagtattagatccc

SEQ ID NO: 37246 - DNA, 120 bp, Homo sapiens
ctatttgaccgagaccacaccagtattagatccctggcctggaaatggattaactgccatagggtcagggctctacccctgcctagatggcttcgggaaagtgggaaggtagggcaggtc

SEQ ID NO: 37247 - DNA, 120 bp, Homo sapiens
gaacgctagacagcacctcggcactatgtttaggggccattttaaacagcacaatcaacaaaaggcagaagatggaaaaagcttggcactaaataaactgtgaaacggagacgtttagga

SEQ ID NO: 37248 - DNA, 120 bp, Homo sapiens
actcgtccatgagggactgcaaacgtgccaggagtattgattttggggtcacaagtaaattttaacatgtggatttgcaaatacaggctctacaaataatgaggatcacctgtgtatctc

SEQ ID NO: 37249 - DNA, 120 bp, Homo sapiens
acacgcacgggtgtgtctaacttgaaacccgtgattcacaccaatacttcagattccagcttaacacaatgggcttccttctaatttttcccttttctgggccaccatggcaccccctcc

SEQ ID NO: 37250 - DNA, 120 bp, Homo sapiens
agccgtgggcaagaagcaagagggatgtgattatgtcttatgatgacatttatgttctagtgtgctaacttaagatagagcgatattaacatatttataaagcctctttatatcctcata

SEQ ID NO: 37251 - DNA, 120 bp, Homo sapiens
gtacgcacacaattacgtacataagcacatgatggcagtaagggcaaagagagtcttgctttaaaaagtagggttaaagactggtaacaccacgtcaatgtgacagctactgaccaaata

SEQ ID NO: 37252 - DNA, 120 bp, Homo sapiens
gaacgattaagcctgtcttaatcagaggctattgccttggttcgctggagcatggtgacctaaaagctacttgtaccaataatgtcttagattgctttcactttctcttttttaattttt

SEQ ID NO: 37253 - DNA, 120 bp, Homo sapiens
gagcgtattggtgggggaagtagcgtgaggacccatctgcaaatgttgcttgcatcttgcaaaccacacagaactgtggggcttggttcttcactactgaatgtgcacatggggcttcag

SEQ ID NO: 37254 - DNA, 120 bp, Homo sapiens
ctacgagatggtcttggaggtttctgcatccatgctgttagaacacgatgctgctccagagccaagaggaagccagcagcagctgggaacagttaggctactgcacgcaggcgagggctg

SEQ ID NO: 37255 - DNA, 120 bp, Homo sapiens
ggacgggaactcccgcagcatatgtgttgggggctgagggtgaagcatgggttgatgccgatgggcagagtggaattttaaatggaaccacctgtctttttagagaataagactctctca

SEQ ID NO: 37256 - DNA, 120 bp, Homo sapiens
tgtcgtttcgctggagagggcagagatctgagtgggcagagtgggcagatgggaatggatgctgaaggaaggactgtagggcccactcctgtgtgagtgtgcaatagagggggactgggg

SEQ ID NO: 37257 - DNA, 120 bp, Homo sapiens
tcttccatgggtcaaagggcaagtttgagagagtcttcctatacccttgacttccagccattcatcttaatgacttgcaagcattagggattatggcacacataacgatatacatgacag

SEQ ID NO: 37258 - DNA, 120 bp, Homo sapiens
tgccggttatattgagatgccagacgagtatctcagtagatgtgggttggttgtcccaaggaacgttccattttctggatgatcagcatgggtctggcatggtgggaatacccactgcag

SEQ ID NO: 37259 - DNA, 120 bp, Homo sapiens
gaccgaagcattctgaaaacagttgagaatgtttcttacattggctgaattactaccctattctgctgtgttcacatttgcaaatataaatatgtaggttgttgatctaaatgagctctg

SEQ ID NO: 37260 - DNA, 120 bp, Homo sapiens
ctccgtcccttattgatatccttggttgaaaaatatgactagtttaggattgctgttaatagaacaattttgaatatccaaggagtgggaggaggttcttgaatgaaatgagctcattcc

SEQ ID NO: 37261 - DNA, 120 bp, Homo sapiens
ctgcgctggctctcagtgatccgctgtaatcaaggacaaaagcaggaaactcagccaaaactaacccagctgactcagctgtctcatcccgatcttccccactgcccaggttctcccaaa

SEQ ID NO: 37262 - DNA, 120 bp, Homo sapiens
ccccgtaggcagattgtatcaaagtccccatcagcagccaggagcccctggtcaggggaggcctggagccagagccctttcctgcaacctctgttgacaccatctttcttctcaaggagg

SEQ ID NO: 37263 - DNA, 120 bp, Homo sapiens
tggcgtgtgcctttgtggagaagcagaaacttgtcctcggttttctgattctaaagacagttgtttgtagagagattcccatggggtagtgaagaaggctctaagatcttagctaaggta

SEQ ID NO: 37264 - DNA, 120 bp, Homo sapiens
ccacgccatactctgaatgtttcttcattcccaagtagctcttctattctcccccagtatgcgagtcttttgctttgctttttgtctcggaatcatttttcaggtcagctgttttgcagg

SEQ ID NO: 37265 - DNA, 120 bp, Homo sapiens
gggcgggcaggggggaccctcaactggaagctgctgccacagaggctgctctgtccgtggccctccctgaggccaagctacagtctggccttctcccatagcccacagggctgtccagcc

SEQ ID NO: 37266 - DNA, 120 bp, Homo sapiens
agacgaggaaataaatctctcagctggaggaaggcatttgccttcctttcaaagccctttcttgttattgaagttattcttgccaagttcccccataaaaggccttatagcgggagcacc

SEQ ID NO: 37267 - DNA, 120 bp, Homo sapiens
gtccgagctacatagtgtttgtaggcatggccaagcagcttggtcttcctgagctggcctcggccgctacctgtcccggctttgggtccctgatttaggacacctggagggaccaccaaa

SEQ ID NO: 37268 - DNA, 120 bp, Homo sapiens
gctcgttcctagcaactggccttttgactgtttcttgctgtgcgtccctgtcctctatgccttgtgtctcgttatatgccttgatggtgtgtatagtgtacccacacacagccatgactt

SEQ ID NO: 37269 - DNA, 120 bp, Homo sapiens
tcccgtgatacttgtcttggcctttgtcacccatcctctgaggggctttccagaacctggatacctcatttcccggccagctctatgccagtctgacttgtcttttcctggcaggaccta

SEQ ID NO: 37270 - DNA, 120 bp, Homo sapiens
gaacgtggtaggtacccaggaaatggtccctgtgcctctcctgccagactgtgtccacagcctctgctgagatctcagcagcacgggggacagagtgtctcatactccatgcctcttgct

SEQ ID NO: 37271 - DNA, 120 bp, Homo sapiens
gcacggtaacacagtgactcccctgccctggtcagcatgtttgaagaaatctacctacgaaacgttgtcagattcttctttgggtcgtagtcaagggtagtgggtgtgtgcacgcagagg

SEQ ID NO: 37272 - DNA, 120 bp, Homo sapiens
atgcgatttacattgggtgcattgggccatcctgagggcaagaacggtgtgctgtggcgtcccgggaggcagggctgtctctggaagaggagagcagggggaggtgtccggggctcagct

SEQ ID NO: 37273 - DNA, 120 bp, Homo sapiens
gtgcggggtgttctttctaaacacagggcactgagccagtgcccagccatggcattgtaagctagagaagcacgatgtctagatgagaagaccaacaacaaggttcaaagggggtgccac

SEQ ID NO: 37274 - DNA, 120 bp, Homo sapiens
tttcgggccaagccagcaaaatgattacgaaagtctttgaagacctaagtcacattaatgactcagaactgctgtgtttttgacaatgaagctttggatggacacactgacccagtgtcg

SEQ ID NO: 37275 - DNA, 120 bp, Homo sapiens
gggcgtacattgcagcatgaatttacaccactatcctggcatgtctgcatggctgccatttaacttctccatcatcctatgaggcactttatcatccctattttagaaaggaagaaattg

SEQ ID NO: 37276 - DNA, 120 bp, Homo sapiens
taccgcctgtgtggtgctgggtgtgagtcggagctagcctgggtttacctgagttgcagggtcacccctcatcgcacccttgtcagtcctcaaataggggtgcaactgttccatgaaagg

SEQ ID NO: 37277 - DNA, 120 bp, Homo sapiens
aaacggaagtgatccagagggactctgaatattacagaagtcaagagatttcatcatctttattcaaagaaaggggtttgtttgttgattttttggattttttttttggaccacagctct

SEQ ID NO: 37278 - DNA, 120 bp, Homo sapiens
cctcggtcctaatactactgccttccatccttaaggggaatcctctggaacccctatctggagactgctgatcaattctaccgtatctgctccttcttgagcaacatccacacagtctaa

SEQ ID NO: 37279 - DNA, 120 bp, Homo sapiens
cagcgtccgcccacataagcactcaacacatgcttgttgaaggaatggatgaacaccaactgcacacccccgagactcaatacgtctcatgtatgcgtcccaactttctggcacctttct

SEQ ID NO: 37280 - DNA, 120 bp, Homo sapiens
catcggaccacaacttgcctgtgcaatgatggactgcctaacccctgacctttttcctccttatctctctgtccccggggcccatgtagaaaagacaagatgctactatctacaggcagc

SEQ ID NO: 37281 - DNA, 120 bp, Homo sapiens
ttccgtgaaagctcttgccaaaaaccatcgctgaagaatgttatgtcgaaggctgtaagtggtagagtagctcaatcaggaggctgtcgtctagctgagctgtaatctcctaccacaaag

SEQ ID NO: 37282 - DNA, 120 bp, Homo sapiens
gggcgccaacattccctggcaaggtcagattcctgatgcccttttgggggtgtggtcctgccggtgacctctgtagctgtccatccttcaccccacaccccggtccctcactgctctggc

SEQ ID NO: 37283 - DNA, 120 bp, Homo sapiens
ggccgagcccacaggactggtgttgcagggaggaagtggtgagctaccaggagacactccagaaacggtgtctgtaattggcctggagagagtggctgtccagatgcaggcaattttgac

SEQ ID NO: 37284 - DNA, 120 bp, Homo sapiens
aaccgtgccacggcagttgagtcccagccctgcacacagctgccttccccttctgcctggaagtcagccctcctggcagccgccctctgccctctgcctggccagcccctgctcctgttc

SEQ ID NO: 37285 - DNA, 120 bp, Homo sapiens
ccccgacttgtccttgcttacagcacccatcccctccctcaacgcacctacccccctttcagttaaattgcttcgggtgactcctcccctcccttggtccccatcagactgaagagcaca

SEQ ID NO: 37286 - DNA, 120 bp, Homo sapiens
tgtcgtgtggtgttcaccccagtgttccagagctggccggggccggcacgtggtgagccctcggagcacctgtgttacatggatgaatgaaggaaggaaaaacggctggttttttagtgg

SEQ ID NO: 37287 - DNA, 120 bp, Homo sapiens
acccgcacacacacgcacacatgcacacctttttggaggcactgcacagcaagcacagaagtacgccactgagtcctgtgtccctaaagtatttgactgtccctccgctgggggaaaggg

SEQ ID NO: 37288 - DNA, 120 bp, Homo sapiens
ctccgtgtgctgtcgctgtgccgccccctgcctctctgacccgcgcccgcagagaaagtctcaagagccgccccaggctttctcccacgttctccctttctctgctgcagttgagtttcc

SEQ ID NO: 37289 - DNA, 120 bp, Homo sapiens
gagcgtgagcgcgcaggatgacacctggctggctgagagctgccggggaggcgctggcgggtgccgagagcgcactgaccctgacgcggggtgcagcacggctgggaagcccccgggcct

SEQ ID NO: 37290 - DNA, 120 bp, Homo sapiens
aagcgcgccgggggacggcacaggggggcgacgcgcatccaccacctggtccgcgctctcccggcctccggcagctcagggcgggctcggttggggaccctaatggctgggtgccggccc

SEQ ID NO: 37291 - DNA, 120 bp, Homo sapiens
gcacgcggagggcggagggttgcgcctcggccccggctcggccccaacgccctctccctggcgcgcaggtttagaaacagggcggcctctccggccgccgcctcggcggctcgggtcccc

SEQ ID NO: 37292 - DNA, 120 bp, Homo sapiens
caccgtcaactgggaggccggcggccggcagcgaatgggcgagcggcccccgcgggaggagcggggagggggcacggggcggagggaggagaggaggaaggggggcaggagaaaaaagct

SEQ ID NO: 37293 - DNA, 120 bp, Homo sapiens
atgcggtcgcccccttgggaaagtacatatctgggagaagcaggcggctccgcgctcgcactcccgctcctccgcccgaccgcgcgctcgccccgccgctcctgctgcagccccagggcc

SEQ ID NO: 37294 - DNA, 120 bp, Homo sapiens
ctgcgcctccccggccctgcgcccgcgcccagagcgccgggactcgagcctggcacccccggctggatccccaccccgaggactcggggagccaccaccctacccccaccaccacccagg

SEQ ID NO: 37295 - DNA, 120 bp, Homo sapiens
gggcggccagggcgcgcgtctggaaagaaggaagggaaacgcaagagccaggcttagtctaacttagtctggtctgaggacgcttatttcccttctctggttcccatggcccgcgaaatc

SEQ ID NO: 37296 - DNA, 120 bp, Homo sapiens
aggcgctttattctcaggactgggaatcagtttgggggagggaggaggacacccggttcctggggacgtttgaaggaagggcgagggatggagaaagggggtcgagtaactcaagtgtta

SEQ ID NO: 37297 - DNA, 120 bp, Homo sapiens
gttcgttgacttttgactggggagaaaggaaccttaaacttggggaggagaagggagtcctggagttgttacctaagaacaaagatggggcggaatggaggctacagcccgaaagccagg

SEQ ID NO: 37298 - DNA, 120 bp, Homo sapiens
tggcgttcttctgtgtccccaagtagtggacttgagcccgctgagacctcggcaggagtctcgtcccagggcaggtgggtgtgcggggtgagccgcggagcggttccagctcgggtaaag

SEQ ID NO: 37299 - DNA, 120 bp, Homo sapiens
cctcgggtcctttgcactccaactcggcggcgccccgagcccgaggggccccagccaacccgacgcccgtgtgttgtgtgtgtctaacacccggtccgtgccggccgcccgcgcccgccc

SEQ ID NO: 37300 - DNA, 120 bp, Homo sapiens
gcccgccgctgcccccagctcgaggaggacatcgcggccaaggagaagttgctgcgggtgtcggaggacgagcgggaccgggtgctggaggagctgcacaaggcggaggacagcctcctg

SEQ ID NO: 37301 - DNA, 120 bp, Homo sapiens
ggccgccgaagaggccgccgccaaggtacccggggcgcgcggcacggcgtggcgcacgaatggctaactctttctctttctctctctccctccctgtctttccctctgtctctcccgctg

SEQ ID NO: 37302 - DNA, 120 bp, Homo sapiens
cttcgggatcacgctgcctgctgcacccccctccctccctgtaccccctggccaactcccagctggaagatgagctggtgtcactgcaaaagaaactcaagggcaccgaagatgaactgg

SEQ ID NO: 37303 - DNA, 120 bp, Homo sapiens
caccgatgtaagtgcacgctcacactgcttccctcacctcttgcctgcgtggccactccggggtcaccacagggctggagagcaatgaaggaagtttaccttttcctgctggacacctgc

SEQ ID NO: 37304 - DNA, 120 bp, Homo sapiens
tgccgcctctgactgctactgcacacattcatttatatttcatccactcctctcttcttctcctttcctttacctccctgggggtggaggtgggtggatgagaggctgggagaatagagc

SEQ ID NO: 37305 - DNA, 120 bp, Homo sapiens
tttcgcactttctataagtacactctacaaggggaagtggggcactaatggactgggagggcaggtcaggagtagcccaaggtatgcatgtgcaagaggaaaacttgataaactcaagtt

SEQ ID NO: 37306 - DNA, 120 bp, Homo sapiens
aaccggaagggaaaacacttccaaggatatgagcatgtcttgtccctgcctttgggccacccatgcacaccagctccacagcagctgaagcagagcagatccagaggaggctgtcggagg

SEQ ID NO: 37307 - DNA, 120 bp, Homo sapiens
tggcgacacttcctatgtccatagtgtgaatgtagtaatgggatatatgtcttggaacccccaagcatatgtcacgtgcaaaacaccgtgggaagcagtgggggtgtggtaaagagatgg

SEQ ID NO: 37308 - DNA, 120 bp, Homo sapiens
aagcgagtccgaactaataggcatgtgtatttggaggcaacaaggaagagagaaccattctgactgggagctccctggaggaggtagcggacgtttgactggggtttggcatattcaaaa

SEQ ID NO: 37309 - DNA, 120 bp, Homo sapiens
gagcaaagaggacagagcagcagatattccaagcgagaaaacataacgagcatagcatcctcccatgtcctaccatttataagagaatgttaatgtgagaactgctcagtctcctgacag

SEQ ID NO: 37310 - DNA, 120 bp, Homo sapiens
gaccgattgtcaggggaattggcaagaccagtgccaatcctgttttgttctgggtatgccatctataatgccatccatccacttccctatgacacaagaaggtatatcaggaagtgacta

SEQ ID NO: 37311 - DNA, 120 bp, Homo sapiens
ccacggacttagccaagtctccttgggtttccagtaacagaggcatctcacacttgcctgagctaaaatggagagtgtgctgggcacccgccagggcaggaagggcagctgggccacatg

SEQ ID NO: 37312 - DNA, 120 bp, Homo sapiens
aggcgtctttgctgcctttggcaccacagctggtggctctgcgctaccccctccaggctgcctgccttctccctcaaacccctagcattaatgggacattgtttgttaactgaaaacatt

SEQ ID NO: 37313 - DNA, 120 bp, Homo sapiens
tgggacattgtttgttaactgaaaacattttctccacaaacttcggcaaactggtggtgaatgtctacaacaaaaacattttttcctgtggaacaatcaaatccgaggaccacatgttga

SEQ ID NO: 37314 - DNA, 120 bp, Homo sapiens
taacgactctggttcagaaaaagtagaatttaatacttgatcataaaggattaaactcatctcttcaatcaatgttctagtgaatgaaaaaagccttcctacatataaaggatgggcatg

SEQ ID NO: 37315 - DNA, 120 bp, Homo sapiens
cagcgagattgtttggatccactgagaaaagctggagggaaataggtttagatattgttttagaggtaaataagtctagtctttgaggacaaagaaaaatttagcagtatatttttgaat

SEQ ID NO: 37316 - DNA, 120 bp, Homo sapiens
gctcgagtctaggtctgcctgtcttcacccagctctggacatcagctctcctgtgggtgttagaactgttacttgagaatattttgcaggaatagagttttcatagcatgagaagagggt

SEQ ID NO: 37317 - DNA, 120 bp, Homo sapiens
tggcgagtaatgtggagtatgatatcactaagcttcagaaatgcaagtagccacggaaatgtaaaaagggaaattcaaggtaagattgtagattcttactacctaggttaggggttgcaa

SEQ ID NO: 37318 - DNA, 120 bp, Homo sapiens
gggcgtggctgctttttatttgcagctttaccattgccatgctggaaaatcatcacatatttcaagatttgctgaaaatttctcataaaaactcaactttatgggcaattaataaaaaca

SEQ ID NO: 37319 - DNA, 120 bp, Homo sapiens
tgccgttctagctttgtgggctttggggagtcagttatccttctagggccttagttccttataacagagtgtaagaatactgtgtctacctttcagagttgctgtgagctccttaaggca

SEQ ID NO: 37320 - DNA, 120 bp, Homo sapiens
attcgccttttaaatctccaaggcctgtattaaatgtctgcacattggatgaatgaacggatgaagggatgaattgtgaaagccctatatgagctgtaaagcatagcttgaatttgttac

SEQ ID NO: 37321 - DNA, 120 bp, Homo sapiens
tcccggtttctaactcaggcccttaggaagcaatcaaatatgtgtgcagcagaatgggaacaggaggggacagagtttaattatgaatctgactctttcgtgaaaaggaaactaattgta

SEQ ID NO: 37322 - DNA, 120 bp, Homo sapiens
cctcgcagacacagtagcattgtaaactagatgaacacctgatttgtttaagtctccataatgcctctgtgatccagaaagcagagaaacccgagcaactcagctttttatataacgaag

SEQ ID NO: 37323 - DNA, 120 bp, Homo sapiens
aaacgcatgagcttgcctcatagggaagtctctgagccctctcttagcctttatagtcttgatttatgcagtggtcattggtttctctatggcccaaaaagattaggagcagggctgagg

SEQ ID NO: 37324 - DNA, 120 bp, Homo sapiens
cattggtttctctatggcccaaaaagattaggagcagggctgagggcctcttggaggcaggccaccaacatcggagaggaaaaattggcagtgtgggactatggaagacattcattatgt

SEQ ID NO: 37325 - DNA, 120 bp, Homo sapiens
atacgttgcatttaacacgtgtgggaattctttgctgagtaattagcattcctttctccagcctgtattcagaggaaacataccattcacaccctctctgtgttcacattttccagtgcg

SEQ ID NO: 37326 - DNA, 120 bp, Homo sapiens
gaacgatagaactagatggaaagaaaattaagcttcagatatggtaagtaaacacacacacagagtttctgctttaattgggaattgaaagtaggaattaaatgtgaattgtaataagtt

SEQ ID NO: 37327 - DNA, 120 bp, Homo sapiens
tatcggaaccaaggggaaataagtaagcactgggaatccttcaaaggtatcttcaccaagagttgggaaggtgagagagggtactaactgttgaagccagaagagatctgatagctcatc

SEQ ID NO: 37328 - DNA, 120 bp, Homo sapiens
gaacgcaaattacttcttcatcacagttgttgtagttttgaaatctgataagacagagtagtcacgtcgcaggaacccttggcaggaagtacagatctaggttctagccaggatgcctcc

SEQ ID NO: 37329 - DNA, 120 bp, Homo sapiens
aggatgcctccaaattgagggctttgggccagttatttcccttctcagggtctcaccttttcctcgtttgtaaattggttggattgatggcattggagttcccctccagctatgatattt

SEQ ID NO: 37330 - DNA, 120 bp, Homo sapiens
aagaacatccagcacctccacgtgtctcactctcctgaagctctccaaacccagtcctttgagtttttatggaagcttccttatatagccatgattgattgcatcgtgggccattggtga

SEQ ID NO: 37331 - DNA, 120 bp, Homo sapiens
taacgtcacaagattttaagcttgggccagatatgggaaataatttaatcctagatcacattttacacatgaataactgagaacagaaagaagtgatttgcctgtgctcatacagccttt

SEQ ID NO: 37332 - DNA, 120 bp, Homo sapiens
acacgtttctataaacttagatgaatttctttttaaaatagtacagaatctagaataccatctccactggttcactcagtaccaagtttttgtccttctttgacctgaatatttggaaat

SEQ ID NO: 37333 - DNA, 120 bp, Homo sapiens
cctcgggaagaaggtttgcacaggctctgtgagggctcttgtactgtagctttgcccctcttcccatctttaaacttttctctgaattaggccttgtgtgagtaaaagattatgtcttat

SEQ ID NO: 37334 - DNA, 120 bp, Homo sapiens
taacgggtttttctcaggctgtttttatagcatgctattttctccctgcagcatgcctcttccgatgtcgaaagaatgatcctgggtaacaaatgtgatatgaatgacaaaagacaagtg

SEQ ID NO: 37335 - DNA, 120 bp, Homo sapiens
attcgagatccagctctctatactgtgtggtcatgactcattcctaaagaatttgctaatgttttctgggagatacaaattggtcctttctcagattcctgcagcttagagttcaggctg

SEQ ID NO: 37336 - DNA, 120 bp, Homo sapiens
tagcgttaggttttatggataaattccttgtaactgatcaagctatggatgtcatttatatgttgtttatgggcatgggcatttctctcttttgtgtcctgtaaagcaaaggaatatttt

SEQ ID NO: 37337 - DNA, 120 bp, Homo sapiens
acggagcagtccagatgctgctgcttcgaggtgagatgctctgtttaatgatacaataatacaaactggaggcatctttagcagtttgtgcctttgcaaagaacactgtttttcaaagga

SEQ ID NO: 37338 - DNA, 120 bp, Homo sapiens
gaccgggttgctgttgccccacctgtgatgttattttagactaagccagtgattttcaactggggcgattttgcccttcaggggacattggcaatgtctgaagacattttcagctgtcac

SEQ ID NO: 37339 - DNA, 120 bp, Homo sapiens
ggtcgagactggactattgtaattgtcccctcagggccgtgaggaaagaggaaccagagcatgccccacagcggaggttgatcttgatggagttggctgctctccctgtcagtcgttctc

SEQ ID NO: 37340 - DNA, 120 bp, Homo sapiens
ttgcgggccctgtggtttctgtcactaccagctctgctattgtagcccaaaagcagtcacagagaatatgcaaacaaatgaatgtagctgtgttccaaagaaatttatttataaaacagg

SEQ ID NO: 37341 - DNA, 120 bp, Homo sapiens
ccacgacagcagcttctcaatgctctttggagggaccagagcccaggcagtagcaacggctatgaggtggtgagacgtgaccagcagataagccctgggcaatggtccagagctggaggg

SEQ ID NO: 37342 - DNA, 120 bp, Homo sapiens
ggccgctggacgttgacctgatgctggctcaatgtttcacgtaacagctttcacaataaggatgttctttctgatatcttacctatagcactcttgctattatttaaagttttcctttat

SEQ ID NO: 37343 - DNA, 120 bp, Homo sapiens
ccacgaaaacaaaaatcttttgctttttcatagttcttcttaaacctgaagaccttcatcctggctacttctgtctcttctctagagatgcgtgaagtatagtgggaaggtcgagggctt

SEQ ID NO: 37344 - DNA, 120 bp, Homo sapiens
attcgaccaacctgccaatcacagctctgccaccgactagctatgtgacctagggcacatttctttgcttctctgggcttcacttacaaaatggaagtggcagtacctatctcaccgggt

SEQ ID NO: 37345 - DNA, 120 bp, Homo sapiens
ctgcgtaagagccatgtctagacaaggtagactcttacgcacgctgggtcccaggccctcctgagttgatttgtctcagttctttctttttttcttaggggctggtttccaaccttttag

SEQ ID NO: 37346 - DNA, 120 bp, Homo sapiens
atccgaccatcccagatcaatgtcaccttctctctggtgccttccctgagtcccagagccaaaaattaatagagaaataacccattctttcctcaatcatcaacaagtgtttcctgagca

SEQ ID NO: 37347 - DNA, 120 bp, Homo sapiens
agacgctgacccctaagctgtgcagacacaccctccttctagataactcttcttgagggtaaaaatggctccttggtcaccctctgttcctcttggaagtcctagaacactgctgtgcat

SEQ ID NO: 37348 - DNA, 120 bp, Homo sapiens
gagcgagactccatctcaaaaaaaaaaagaaaaaaaagaaaaaagaaaaacatgtctggccttttccggctctcctgagagtactttgtgccccttattcatcctcaggatggcagctgg

SEQ ID NO: 37349 - DNA, 120 bp, Homo sapiens
agtcgcgagaagtggctggaatgttttgagatggccaagcctccctccctttgatagagacaagagccctcggtctattaattgcaggtgctccctgctgttttgagtctcccctgagct

SEQ ID NO: 37350 - DNA, 120 bp, Homo sapiens
ttccgcagatacaggacagaaggcgggtggaggtgtgggcctggaggacttcagggacatgaaaatgaggtttgccccagtggaggatctccccctgatttccaaaggaaattctttaag

SEQ ID NO: 37351 - DNA, 120 bp, Homo sapiens
agacggacaatgtattatctgggagaggaaccaaggagtgcagcaaaaggaatgcacagcactgcccggctcacaccgagtcctgccagagccgagggccacgagggctggcctgccgca

SEQ ID NO: 37352 - DNA, 120 bp, Homo sapiens
gtgcggccacagccacagccagccacctggcacccccgtgccaggccaccttctttccaaggtttcctgaacaggatggaggggctggcctcgcgggtgccctgtggggctgtgataggg

SEQ ID NO: 37353 - DNA, 120 bp, Homo sapiens
tggcgcaccctccaggaggaaggcttgtcatccatgttcttctgccatcccatcgcgtttaagactttgcagatcttgagcaaacaggggttttcatctatttctcaaccagctcacatc

SEQ ID NO: 37354 - DNA, 120 bp, Homo sapiens
ccacggctcatgccacttctctacttaccccggttccgtttcttaccaccgagggctttgcatgcatgtatgcaaacaactctgtccaagctccaaccatgtgctttcaccagcaaacag

SEQ ID NO: 37355 - DNA, 120 bp, Homo sapiens
cagcgaggggcaaagccagagaaatgcagagggtgccgaacaaggacctcagctgccctgatctggggttgatgctgcctttgtacttagcactgcctgccaatggcaggccacctctgc

SEQ ID NO: 37356 - DNA, 120 bp, Homo sapiens
tagcgacatctctggacccagtgagaaactccaatgtcgaattcagagggactgaatgtcccctcccgctaaaaattcttctgatgctaaaaccgtgtctgagctgtgttttgtttgata

SEQ ID NO: 37357 - DNA, 120 bp, Homo sapiens
aaccgcttcacagacaaagcagggacaagagaggctctccaagttcagggattgggcaaaggacaagatgtccctcctgccccttcctctgacaatgaagcctcgctccctgggaaaggc

SEQ ID NO: 37358 - DNA, 120 bp, Homo sapiens
tttcgatttggaatgttggattctggctttaaccaaatttattattatttgtatttaactgaagtgggcatgtaatgacagcagccaaactccagtgaagaaactccctcaatacatagc

SEQ ID NO: 37359 - DNA, 120 bp, Homo sapiens
caccggccaggtcacaccggaccttgctgctaacattggaatggagacccactatccaaaaaccacatctaaacctatccttgtttttatccagtccctgacaagaatttacaaaaatac

SEQ ID NO: 37360 - DNA, 120 bp, Homo sapiens
ccaaaaaccacatctaaacctatccttgtttttatccagtccctgacaagaatttacaaaaataccgacttgtgacttgactgcgaggggcctttgttgtttaattttaagagtacttct

SEQ ID NO: 37361 - DNA, 120 bp, Homo sapiens
ccacgtcttatgctcatggtagttatgtgcttttctggtgtagatattcagtctgaaaattgctggcacacctgaagacctttcaggaatgatgacagcaagtggggagggttttccagt

SEQ ID NO: 37362 - DNA, 120 bp, Homo sapiens
cttcgggctcccctaaggacaagggtcagggtgtggtgcagttcccatccttcgcgctgcaacacgagctgcagtagctcaggcacccagacctgaggcaggtctggctttctgagaagt

SEQ ID NO: 37363 - DNA, 120 bp, Homo sapiens
ccacgcagcctgtccagagaaaccccgcatggcccctgatctgctctggcccctccacacctccctggatctgtggttcctgcctgcctgcctgcctgcctcatttctctttgttctcca

SEQ ID NO: 37364 - DNA, 120 bp, Homo sapiens
ttccgtgagatgaaaccaaccaaaaaagcatttgtgcctaagcttggcctctggctgtgtattttgggatctcaaactaagacaaagagaaactaatatttgtgggtccctattatgtgc

SEQ ID NO: 37365 - DNA, 120 bp, Homo sapiens
caccgtgaaccttacccaagttatcttacttcatccttacgaaaactgtaaggtagtgattattaactcagtcttccagataaggaaactgaagaaagaggaaaccgtggagccagctat

SEQ ID NO: 37366 - DNA, 120 bp, Homo sapiens
gagcgggaaatgtgaggcaaaatcaaacattgaaacatgcggtgcccccttcggttttgtaccttttgtggctccctagtgtctgatcctttggggagcctgcagtttcgtcagttacat

SEQ ID NO: 37367 - DNA, 120 bp, Homo sapiens
ctgcggggcctccctaaaagacaagggaggaatcaagagaattccaagaaaggcgtccgagcaggaggtaagacagtagatttgaaagcaggactgagggagcaggaatgggaagagggg

SEQ ID NO: 37368 - DNA, 120 bp, Homo sapiens
cagcgggtcaggggccggactaggctagcgaggcccaagtgcggtggccccatgcagagatcctggctcggtgcaaaggagatgccgctcccaccgtctgcaggaggcaagggctcccct

SEQ ID NO: 37369 - DNA, 120 bp, Homo sapiens
ccccggccaggagccgggtgcaagaggagcctggggagggagctccaggcctggagcaaaggctcctcctaggggcccgcggtcggcagagagcgcgggacactcacggccatggagagc

SEQ ID NO: 37370 - DNA, 120 bp, Homo sapiens
gcccgcccggtgaatggagcctttctctgggcacttggcagaactcgggggccctctgtgcagagaggaggcccactggaatagaaataacctctggcttgcagaagcattttgtggaaa

SEQ ID NO: 37371 - DNA, 120 bp, Homo sapiens
gaccgtttttagggcctcgggtaaaaaatcactcttaaacaagacaccaaaagttcaaggaaaagaggaagggtgacttcactaaaattaagaacttctagtcataaaaaaacatgacac

SEQ ID NO: 37372 - DNA, 120 bp, Homo sapiens
actcgatcactgtaacacctacacctggcaaagaattcctgtccagaatctatttttaaaacttcgacaaatcaataagaatgaacaatttaattttttcaatggggaaaagacatgaac

SEQ ID NO: 37373 - DNA, 120 bp, Homo sapiens
ccacgaggctggcagaaatttaaaacacaggcaatcaagcaggggcaaggatgtagaacaatgagaattctcatacatggttggtaggagagttgattgttaccaccacttggaacagtt

SEQ ID NO: 37374 - DNA, 120 bp, Homo sapiens
acacgcataccttatgactcagtaattccacttctagataaatattaactctcatatataggcagtaggagaaataaacaagcatggtttaaaatagtcccaaattggaaacaactcaaa

SEQ ID NO: 37375 - DNA, 120 bp, Homo sapiens
ctgcgacgtctccaagacatgctcaagaattaattagctagccagggagcggaccccaagttctactgtctctgacccctcctgagtgcaggtctctgaggccaagcccctcgagcaggc

SEQ ID NO: 37376 - DNA, 120 bp, Homo sapiens
agacgctctcttgcgcttgtgggtttcttctcaatatgatttcattactgtaaggcagatgtttcattgccagggcaaccagggggtggaatatgcacagagcagcctccactttgaact

SEQ ID NO: 37377 - DNA, 120 bp, Homo sapiens
acccgctcaccttgatacctctccctactgtcttgtgatcagacttgctccctcaaaatagatggatatatttttcaatgtatttaaaatgaactggaggccgggcgaggtggctcacat

SEQ ID NO: 37378 - DNA, 120 bp, Homo sapiens
ctccgcagcacacacaggtttctaaactacactgaggggtgactagccctctgtggccttggcctgtttgatgtgaataccctatctccctggtgaggcttggaggcctcagtgggagga

SEQ ID NO: 37379 - DNA, 120 bp, Homo sapiens
gatcgattcctcaatcatgacaaaacccatatagcctgcagttccctctccttccattccttgtcccagttaaaatacctttcaactagactccacttttggaattgtcactgacaaagt

SEQ ID NO: 37380 - DNA, 120 bp, Homo sapiens
gaacgggcaggttctaaaccaggcttgcagatcagggccatcagcctcttaaatgcagcccagatgagcccaccgttgtctggtgtctgagaggaggagggcacagtgcgagggcccatt

SEQ ID NO: 37381 - DNA, 120 bp, Homo sapiens
cgagggcccattctggttgtttggggatgtttctcttagctcgttgcttggagggtctacctggtttctcatagctgctgcctggggtaaatgactggctttgaatcaagtcccagagtg

SEQ ID NO: 37382 - DNA, 120 bp, Homo sapiens
gctcgtgtggaccctctgaaagggccttggggacccctgtgggtccctggatcacactttgaggactgctgccttagtgaaactcttgtacatgtgcacgacggggttgtgcaagattgt

SEQ ID NO: 37383 - DNA, 120 bp, Homo sapiens
gttcgttgcagcattgtctgcaatagaaaagaactggaaacaacccaaaatgttgtctatcatcaggagaatgaatacatgaatcatggttcattcacacatcagaatatttgtatagca

SEQ ID NO: 37384 - DNA, 120 bp, Homo sapiens
caacgagagcgaaactccatctcaaaaaaaaaagagggaaatatactcaagtttctatcgaggtcatcactgataagactgaaagccctgagcattagtatcctagcagctgctaacctt

SEQ ID NO: 37385 - DNA, 120 bp, Homo sapiens
ttccgtgtgcctgggacactatgcacccttccccactccttccccatactttaccttcctaatgcctaggtctccgtcaagtctcaggtcatatgctacttcctccaggaagccttgctt

SEQ ID NO: 37386 - DNA, 120 bp, Homo sapiens
tgtcgtttcatggtggaattggaattaaatggaaaatcttgaaccttggggagtatacactatgatggagtcttcttggccgattgccaggcttttgtgtgaagttgtacagagctgcaa

SEQ ID NO: 37387 - DNA, 120 bp, Homo sapiens
tgtcggctcacttgtgggttttagaataaaatgctagggaatcaccccgtagcattacactgatggcctaaaagaaatctgtgatagttgtaaattgacgaagatgcagtttaaattaac

SEQ ID NO: 37388 - DNA, 120 bp, Homo sapiens
cctcgtgcccgttagtaattttacttcaatttattaattttccttgtacactaatttcttgtggttagactgaatgattgatttcagaggtaaaacattggtgcattaggtttaacatgt

SEQ ID NO: 37389 - DNA, 120 bp, Homo sapiens
atacgtttgaaagactgaattttgttaactgtctttcagaaatggggaaggttacatcagatctataatactgtgtcccctgatcatcttgaaggactaaagagccacgtaacatttttc

SEQ ID NO: 37390 - DNA, 120 bp, Homo sapiens
gtgcgaaaaggaatgattctgatttgacacaaacccacttcttaaggagataagcacattaacttgaaaatgaaaggtaaattaagatttcgatgaaaataaaaatcttcccaagatttc

SEQ ID NO: 37391 - DNA, 120 bp, Homo sapiens
actcggccttgcccagtgaaatcaccctcagtctcttgtgactattgatcttataaaaatgaggccccttcccttcccctttagagctagactctaccctgaggcactagttttggggct

SEQ ID NO: 37392 - DNA, 120 bp, Homo sapiens
ttccgtagggcacattcttttggcagctgtgctggtcagaggctgcgtggttgctgtcactgctgccaaacagcatagctctggacaagcccaaaggggcagagcttcgtcatctcctgg

SEQ ID NO: 37393 - DNA, 120 bp, Homo sapiens
tttcgacctccttggtttgtttttaagagaaccccctactgtacttcatcttggcatggtggagtaatggaggcacaggggcaccagctgaggctggcttctcaggaaagccactgacaa

SEQ ID NO: 37394 - DNA, 120 bp, Homo sapiens
gaacgtggcctatacagctgcaccatatcagcatcccccaagcaaaccaaaaaacaacgactgggattcaaagcaggagagttaaggttgggtcctgggtttgggagtgaagcagcatga

SEQ ID NO: 37395 - DNA, 120 bp, Homo sapiens
aaacgggtctgccatatcgtgaagcctcgggtactcaggaagggggagcttcacggatagtacctccaggcaccttgcctagagttgagtcagagagggcaggggtggcccactggcttc

SEQ ID NO: 37396 - DNA, 120 bp, Homo sapiens
gaacggagggcactcatagaatggatggtgtgtggtcaacttaaaggcaaagatggactaaaatactgaacttaaaattgtttcaagcagtttcacattaagagctacctcatccatcct

SEQ ID NO: 37397 - DNA, 120 bp, Homo sapiens
ccgtactggtagtcattaagtgctgggtgggtccagctgggcctggattttcaaggtcaggctctgggaaaaggcttccagatgcagcaatcagctcacccctccattaggcctagcaag

SEQ ID NO: 37398 - DNA, 120 bp, Homo sapiens
ctacggaggaaagagagggtggggagccagaggtggagaagccagggtgctcaggtcagctgagccaaaccagactccaggagtagatgaattactgatttacacagtattcctaaggag

SEQ ID NO: 37399 - DNA, 120 bp, Homo sapiens
ctcaggtcagctgagccaaaccagactccaggagtagatgaattactgatttacacagtattcctaaggagggtggcttagcctaatttttcaaattagcaaactgatgctccacgaggt

SEQ ID NO: 37400 - DNA, 120 bp, Homo sapiens
gagcggcccaggcaagaacacagagctattcaaccagcctctcactgagcttctgccagtcccgtgctgcctttgaggaaaaacacccccttgatcatataacaaactggccctggctgt

SEQ ID NO: 37401 - DNA, 120 bp, Homo sapiens
gcacgacaggagtggaaggaaacagcgtagtgaccccacctttcttttgagctggtaggaagaaaacagaagatggacttggggttgggccccgactggacaaggctattttgatgggct

SEQ ID NO: 37402 - DNA, 120 bp, Homo sapiens
gggccccgactggacaaggctattttgatgggcttaacaaggcccaggaattagactagagtgacatgggtgggggttggggggaggcgaatggcacaacatgtcctgaagttgttccat

SEQ ID NO: 37403 - DNA, 120 bp, Homo sapiens
ggacgtggttcatactgatgtcagcagaacaaatgcctgctatgaaaatacttccagtgctagtagcacaaagaatgctttgtgtggcagaaggcttgatggtttcacaacgatgctgga

SEQ ID NO: 37404 - DNA, 120 bp, Homo sapiens
aaacgctgcaggagcatgaatatttcattcctcacctggtgctcttggtgggacaggtggtgctgtccatgcagcactgtggcagcggccagccgagatctgccgaacatttttcccttg

SEQ ID NO: 37405 - DNA, 120 bp, Homo sapiens
tctcgaacatggttggtatggcctaagccgagctgggaataaatcacaaatatacagacattcaattagaaagaggaagagaggaagtcaatatgaaatttttcttagatggtggcagac

SEQ ID NO: 37406 - DNA, 120 bp, Homo sapiens
gtgcgtttcccatcgatgtcctgctggaacccttccctcacaagtggtgctctcccaggtgtgctccagcgggcaaatgccctcctcacccctccccatctgatattaggaaagaacctg

SEQ ID NO: 37407 - DNA, 120 bp, Homo sapiens
aaacgttactgtttaaatccgataagcgtgaaagcctcgcttgattgcatggcagctaagcatactatgtgtagtggtgtttatttgctgattggttgatttggagaggaaggagaagga

SEQ ID NO: 37408 - DNA, 120 bp, Homo sapiens
catcgattgtgaaagtttggtgagcttggcagtttgtatcatttaagaaaatctgcccgggcttcctcccccaccaggaagtgtcccatcagttccaaagccctcagcttagttattgga

SEQ ID NO: 37409 - DNA, 120 bp, Homo sapiens
ccacgacccagcggacccagctggggaacacctgggtctcagttcaccttctgccaacctctaggtcttacgagcattcctgtttcctctccttccctgggctacttgaggtcatgacct

SEQ ID NO: 37410 - DNA, 120 bp, Homo sapiens
ctccgtgggtgtgaaaggcgatatgtccaactgtgaacacacagggcccacatccttatgactcagcagatgcggctgtcctcaaccacatcgcccagaatgtcactctgacctgcctca

SEQ ID NO: 37411 - DNA, 120 bp, Homo sapiens
aggcgctttctccatgagtccttttggacaacacacattcacccagacacacactcagatgcacacacacacacacagacacatccactacagagacagatgtgcacacactgataccca

SEQ ID NO: 37412 - DNA, 120 bp, Homo sapiens
aaacgtaccccaaacgcagacacgcggacatgcacagacacccaacacacacatgcacacacaggcccccggacagtcagatacacacacaaagacatccacacacacaaacacccagac

SEQ ID NO: 37413 - DNA, 120 bp, Homo sapiens
acacgtccacacaccccacagagacatgtccacaacgggtgcctaggtatgcccagaaacacacagttacccgaatacagccagacacacacacacacacacacacacacacacacacac

SEQ ID NO: 37414 - DNA, 120 bp, Homo sapiens
tcccgtatgcctgaccttgaatgcctctgccaaccccaacagatggccactggctctccgacagggccctctggtctctgaccaagaaccagggtcacaatggacagagaaggggaaaat

SEQ ID NO: 37415 - DNA, 120 bp, Homo sapiens
tggacagagaaggggaaaatggtagaactactaattcaccaccgtgcagttaacccgcagaagtctcattctttcatttaattggtagctttccaaagttcagccacgagaaggcgtaag

SEQ ID NO: 37416 - DNA, 120 bp, Homo sapiens
aggcgcatgggtgcctggcttctggctgctggtcctcaaagtcatcctcaaaggattgtgcatcctcaaaggcccccctctgcccactgcctggccctgtgcttcccaagggcttctagg

SEQ ID NO: 37417 - DNA, 120 bp, Homo sapiens
gaacgtggacccctttaggacagggtctgtgtctgtcctgctctgttccaacccagcatctagaacagtgccaagcatacagcaggagcccgattaatactggttccctgactgccttgc

SEQ ID NO: 37418 - DNA, 120 bp, Homo sapiens
actcgttaacaatgaggcaaagcgaacggttcatcctttcctgaaaggtccactgcagtttatcagctgaagaaatgagcaccgttactaggggccagaaagtctgggctttcattagat

SEQ ID NO: 37419 - DNA, 120 bp, Homo sapiens
catcggtttcctcttcagtgaaacatagtggttgggctagacaagttgtaaaaggctctctgatcaagactgggtttgtcaaaggtctttcctgctcttcttcctagcaggagggcagcc

SEQ ID NO: 37420 - DNA, 120 bp, Homo sapiens
taccgtaactgacttcctaggagctcccagtgagccctgttccagaacatgcctgctgatttatgtaaccaaccatagccaagagcccctcgcaggcccagggcccttgcccacagttgg

SEQ ID NO: 37421 - DNA, 120 bp, Homo sapiens
tctcggcctctgctatcctcccagggtggagggaggcacaggactgtttctgcctgagatctggggaagctcaagaagtccaggtcagctgctaagctttctgcagccagcttgtgggct

SEQ ID NO: 37422 - DNA, 120 bp, Homo sapiens
gctcgacacttttctgaaactgggtcgccttgctgttcctgtggggtcattttgctctggacccatcaactggctgctgacgaagggaactgggacctctttccccagcaccctttcctt

SEQ ID NO: 37423 - DNA, 120 bp, Homo sapiens
tcccggcctcgccctgactttatttctgacttccatgggtcgtctcttgagtgctgctcagcaacactgttcttttggcctgaaaaacagggcccacatttcgatgccattgagtgagct

SEQ ID NO: 37424 - DNA, 120 bp, Homo sapiens
caccgaaggggccaggtcatccgtctttttcctctcccttctcgccgtggatccttcttcgcccttctccgcccacatcgttaggaattctcctgcccccatcttggctgtagttggcaa

SEQ ID NO: 37425 - DNA, 120 bp, Homo sapiens
cagcggctcagcctgcgaggcatgcccaccatctgccactcatcctcccagggccttttccccttcctccagcctgagccagctggaaatccaaggtcaagatcaactttagccaaatac

SEQ ID NO: 37426 - DNA, 120 bp, Homo sapiens
gcccggctataacaataaaaataactcaagctctgctgaatagcaactttttagcttgagtcagagccaaacagtaaaaaaataagctgggtaaagtctgcttgtcattatcagggattc

SEQ ID NO: 37427 - DNA, 120 bp, Homo sapiens
cagcgggagagcggtccagtgccctgcataggagacgaggaaagcagccagagccggcacagggcttggccaaagccacacagttgtttggggcctctgggccataaatcctcaagtgct

SEQ ID NO: 37428 - DNA, 120 bp, Homo sapiens
agccgtgcatcataaggctgctcagccctcttaggcacccacctcccagtcgctccctgagcagggcgtccccttctgtcctgacctgtgccatcccagacattcctgagcaccctacac

SEQ ID NO: 37429 - DNA, 120 bp, Homo sapiens
ccacgctccataagcggggggaggggctgtccagggaacccctaccaactgcattttaaagtctacaggaggattttacttttttaattttgaaacttaattttctttagagttagggtc

SEQ ID NO: 37430 - DNA, 120 bp, Homo sapiens
gcccggattagaccacaacagtgcagatgacagctatgtcaaagtggggacatactgacaggtctttgacagaggcgacaggaagggatcagtacctgagaaaccagtggcttctctgtc

SEQ ID NO: 37431 - DNA, 120 bp, Homo sapiens
taccgggtctctttaaccagaagcttccgaataaagtccttggccagctcgctcgtctggctgaagaattcctcatcaaagtcgtaactcactgctgtgatatttgccagtgtttcctgc

SEQ ID NO: 37432 - DNA, 120 bp, Homo sapiens
cttcgtgtctcccaggaaaggggatgctccacttaagctgagtacgacagacagggaatcaaataactaagggaaagtaggtggaaatggggattacggactcggggaaccctgccccat

SEQ ID NO: 37433 - DNA, 120 bp, Homo sapiens
acccgacagagagaaattgtgtcttcaacggactcaaaagcggaggggagagaaacacagagacatgtctctttgtgatccccagcaagacaagcagaatataatggaaggccagccaaa

SEQ ID NO: 37434 - DNA, 120 bp, Homo sapiens
tcacggtggcacagatatttgcatcatttgtgtcttgaagaataaagaggttgtcagcagtcagagaaggagacggaaaggccttctgggttacaggagcaacttgagcagagcccacaa

SEQ ID NO: 37435 - DNA, 120 bp, Homo sapiens
gggcgaggtaattttaagtcttcacaagaataaactcatctaagagcacgaggtggggccagcgctacaagggtttaaccttacaggctgtagccccactgagagccactgggccccact

SEQ ID NO: 37436 - DNA, 120 bp, Homo sapiens
ttccggcgtcccaaaaatattcttaaattcaactccatcttctatttcgtgagccagaccaaagtcaatcagcttgatgtgtggaatgggaatattcttgtctaacaacataatgttttc

SEQ ID NO: 37437 - DNA, 120 bp, Homo sapiens
agacggtaattaaaggctggttggttcgtgttttggctttggggtttggggtgggacttggtgttctttttaggagactgaaacagcataaactcttccttgtttttggtcctcagtctt

SEQ ID NO: 37438 - DNA, 120 bp, Homo sapiens
ggacggggacatcccagcttagcctctgtttatacttggcttactgaccttggtcttcctgaccgcctctttcccctggccagccaacttcctgttgacaacattcccctcctctagact

SEQ ID NO: 37439 - DNA, 120 bp, Homo sapiens
ctgcgtttaactaattttggtcctcagcaggacacaggaaaaatgcacccgatttccagggaaaataccagctgctcaggctatttccagcccagcaagcagctgccaggtctgacacaa

SEQ ID NO: 37440 - DNA, 120 bp, Homo sapiens
ctacggtcccctctgcctcacccactttctcccactccacacaactttccttcactccactctaaaggaaatgtcctgaaaacacacatccacacaaaatatgtatacaaatgttcacag

SEQ ID NO: 37441 - DNA, 120 bp, Homo sapiens
agacgttcccaaacacaaactcatgcatctctccattgccttaatctccattcaatcaacactgtctgggcatccagtctgtgccaggatctgtgctaggcactacggggcagggaccaa

SEQ ID NO: 37442 - DNA, 120 bp, Homo sapiens
catcgtccactgactctaaatttttagctatttcagttccaaatattggctctgagctgtgcacacactaagggctgacgcaggtggagtggagccaggcctcccagagccagagtgaac

SEQ ID NO: 37443 - DNA, 120 bp, Homo sapiens
cctcgaggacagcgggtgccttggtaggtgccaacaaacacttgaccgagcttccaggcccgggtggctctgagtctcagtgtcaaggcagccacacgcctctcctctccgacacctcaa

SEQ ID NO: 37444 - DNA, 120 bp, Homo sapiens
agccgctggcagggcctggcatttcagagtccctgtgaccttgtcacagaagccctgagttcctacttgacctgtggggaaagcaaagcttaagggtggtaagggatacacttaggttta

SEQ ID NO: 37445 - DNA, 120 bp, Homo sapiens
tggcgcagggcttggcttggcatccaaatcccccagctcccagccctgcactgtgttgacagccttaggacttgtgaaacggcagaagggcttttgtaaactagagctaaacatttcagg

SEQ ID NO: 37446 - DNA, 120 bp, Homo sapiens
tgacgttgtttccccttcctcttatgagggaaacagtggcattttttttctatatcacatgcctgaaaaattcctcaaactctcaaaaagcaaatgagtgtttgcttttcctgcctgagt

SEQ ID NO: 37447 - DNA, 120 bp, Homo sapiens
ttgcgagacagctgtggcaatgagtggtgaccggggcaggcccactgcacaggcatctttccctccccaaaaggaggtattttgagagtgggtgactacgatggcgccaaataccacaca

SEQ ID NO: 37448 - DNA, 120 bp, Homo sapiens
actcgtctcacctgtcttcactcaggcacagccctctgctcaacctgtagaggggagcctcagagggagccaaggctgctggctggtgtcccccactccttgggctgtttccagaagagc

SEQ ID NO: 37449 - DNA, 120 bp, Homo sapiens
gcccgtggtactcaaaagtggttcatgtgaaggctgagcaagagacatccagagacataagtcactgattcaaatggtctggaatgtgaaaccaaggaattggtttaattttatttattt

SEQ ID NO: 37450 - DNA, 120 bp, Homo sapiens
ccccgccaatgattcccacgcacagccagatgtgaaaatagctctattccgagcaagtagccaactctttaaatcctagagcagtggttctcaacccaggccacacattgatattgcctg

SEQ ID NO: 37451 - DNA, 120 bp, Homo sapiens
gcccgctgggtaactgacatgcagccagggctgacttacaacagctttctgattatctccatttcacaaatgaagaaactataccactgttactcatactagttcctcattttcagtatt

SEQ ID NO: 37452 - DNA, 120 bp, Homo sapiens
tttcggaggataacaggagtgaaaatttgcagtcaggcactccctggccactgtactcagcagatgcacaaaagcagaacctgaggtggctctagtatgcccatcagagggcccagccaa

SEQ ID NO: 37453 - DNA, 120 bp, Homo sapiens
agtcgccagctaggctacagggatgatgggtgggaggcgagggtctgtctactttaggacagagccacccagaatgtcatccagggagggagcagaagggagcaattcaacctctaatga

SEQ ID NO: 37454 - DNA, 120 bp, Homo sapiens
gcacggggctggtaggaggcccgattcctcgtcctaatctgctatcaaagtttcatgggcttgacagggagctgccttttcagttcatgtttctccatctgccatcccaggtctcatctt

SEQ ID NO: 37455 - DNA, 120 bp, Homo sapiens
ctccgtcctcagggaaacaggcccacagagcagtcatgggctcccacatggatgtgggctggccacacaagcacattcctgccttgagaggtggcaggtccaggctttccctctgggaca

SEQ ID NO: 37456 - DNA, 120 bp, Homo sapiens
gcccggaggagacccaggggaatccccaggaagcccaggcaggagcagctgaggttgccatggccgtaacagtaggtgctttccgtgtgcacagcttggcatcctcccccttgcagctcg

SEQ ID NO: 37457 - DNA, 120 bp, Homo sapiens
tcccggaatctcaccgtgggctgtagtctcctgaaaggaagggacagtgctgcttgttcactgttgtgcgtttgtgctggatgaggattaaatgaataatgagtcttgagagcaagcacc

SEQ ID NO: 37458 - DNA, 120 bp, Homo sapiens
caccgggaacacaaagatgaacaagatgcagtgcccatccacggaagaaccaccaaatattggaagaaggcagcttcctcgcaaatcttctctttcctaaaggaaatattctatatattg

SEQ ID NO: 37459 - DNA, 120 bp, Homo sapiens
tggagggcagggctgttttgtgaaattttctacctgccaatcccccacaaagtacacagtaggcgctttgacacaaactaaactcagctcgggagcatggcacagacgctgtgctggaaa

SEQ ID NO: 37460 - DNA, 120 bp, Homo sapiens
ccccgcccctaaattaggttaatctgttaagggcagggcaatgtcttacacttcatctgtgtgacccaccacacccactgtaagagaggcaccttacagcagctcaagacttcgaggtgg

SEQ ID NO: 37461 - DNA, 120 bp, Homo sapiens
taacgacaaaagcagtttccagtggcacaaaggcttgttctaggcagccagcacagttgggctgtgggtaagagggtttgtcaaagggccttagaattgtaaacctatgccactgaaaca

SEQ ID NO: 37462 - DNA, 120 bp, Homo sapiens
acccgagaccagtaagatcaggatcatctgggaacctgtcagaaatgcaaattatcaggccctaagctcagacccacagagtcaggaactctgggggtggggcccagcatctgtggtttg

SEQ ID NO: 37463 - DNA, 120 bp, Homo sapiens
ccacgagttctcacgcaacaggaatatcctggtatgccagaaggttcagtttcttctatctctaaagacggcctataaatatcatttttaacttatgtctttctgtttactactactctc

SEQ ID NO: 37464 - DNA, 120 bp, Homo sapiens
atccgcattcttggctttttcaatgtgatgatgatccctacatttgtctctcagcctcaaaccagttatttctcatcactcccaaatcccagctgaccacttcaggcaaagtccccaccc

SEQ ID NO: 37465 - DNA, 120 bp, Homo sapiens
acccgcctgccttaatgtcttgattttcagagttggcactttaattgttctgagcccctactgcagttttggtctctcatttgtctacccatccccacttcggaaaacaatgggtcagtc

SEQ ID NO: 37466 - DNA, 120 bp, Homo sapiens
agccgagcttcctgtaatcttgtttataaactgttgatgcatgtcctgaccgcatcacaagagggttcacagggaagccgtcagtcttggggcagaatctgcagggcaccagcaacccca

SEQ ID NO: 37467 - DNA, 120 bp, Homo sapiens
ctacgtgacttctggcaccaagtcacctcttgcctgtgagcctcttttccctaaaagttagagagtaaagatgatctcaagctgggcacagtggctcacacctgtaatcccagcatttta

SEQ ID NO: 37468 - DNA, 120 bp, Homo sapiens
aatcgcttaaacccaggaggcggaagctgcagtgagcctagactcaaaacactcaagtgtttgtggaagtgtttaggagaaaaacaacgctacagccttatacactccaggttgatgctt

SEQ ID NO: 37469 - DNA, 120 bp, Homo sapiens
aatgttctatatctgtgctgtctaatgtggtagctgctagccacgtgtggctactgaacactcgaaatgtggatagtacaactgagaaactaatttgcaattttacttatttttaattac

SEQ ID NO: 37470 - DNA, 120 bp, Homo sapiens
acacgtggccacagtttgggcttttgaaaaaagttaggtggaggaagagaggtatgagtactctagttttcactgcagtatcccatttgtgtgtgtctgtctcttgagggaaagatagac

SEQ ID NO: 37471 - DNA, 120 bp, Homo sapiens
ctccggaaaatattcttagtcattaaccttccaagttaagtggtggatcagaaatggaaagctggctttattcatctttatatcacaggaatgggtccttctaggcattttttaaatggc

SEQ ID NO: 37472 - DNA, 120 bp, Homo sapiens
ccccgtgagctactagtaaattacatttgtatacatgtatccttaatgtatactggattttaatctctcatacgtctccatttggagatgactggtgtcagtaggaagtgaatgaaatca

SEQ ID NO: 37473 - DNA, 120 bp, Homo sapiens
tttcgatctgtaactgactgtgaacagtcaattgagataactcactaccttcagacctgctaacagtttcttttctgaaatctgtccccaatatttagatgaagctatttgcaaatttag

SEQ ID NO: 37474 - DNA, 120 bp, Homo sapiens
tttcgaagccacattctcaactttcagctcaggttctgcacaatccagctttgttcactctggtaccggtctggggacccaccccacccttgtttgccgctgatcactgagctttgaata

SEQ ID NO: 37475 - DNA, 120 bp, Homo sapiens
gaacgtagtgttataccttcctttgcgtgtcagatgggtcagtaatatccacacagctgggcttcagttaacagtttagctgaggctacagagtaagcatgggtcagagcttgagttctg

SEQ ID NO: 37476 - DNA, 120 bp, Homo sapiens
gagcgaggttatgctgttagaaattaaccctaaaatgtatggacttatttttgctctgtcatgacttgggcagcacttattttactaataacgatttgctgcttattgaactggctgact

SEQ ID NO: 37477 - DNA, 120 bp, Homo sapiens
gtgcgtgtagccttgtgtgaccaagactaggagtaagaattgcatttggtgtcataatccaaaaatgtgcatactggtacaaaacagaaacaaaagttttattaaatgacttgcccttac

SEQ ID NO: 37478 - DNA, 120 bp, Homo sapiens
gggcggcattgctaagacatgccatgcagtgtcagctgatttgtcccttttccttgtgagatcagagaggcctctgctgtcttttcctccttccagagctagcgctgaacacagcccagt

SEQ ID NO: 37479 - DNA, 120 bp, Homo sapiens
acacggcattgtcacgggcactctcccagctggctgaggtggaagaaaaaattgagcagctccaccaggaacaggccaacaatgacttcttcctccttgctgagctcctgagtgactaca

SEQ ID NO: 37480 - DNA, 120 bp, Homo sapiens
attcgcctcctggccatagtccgcgtaagcttctgtttccttttctcctccttcccttgatttgatttgtttttcctttgctggtccccttcccaagacagtttcatcccattatagctt

SEQ ID NO: 37481 - DNA, 120 bp, Homo sapiens
ttccgaataggttgccctttattgttgaggccagacagtgtcttctgtggtcctttcttgaagcaaggttgcttacagacctactctcttggtcccctggagcagtgacttcctcagtcc

SEQ ID NO: 37482 - DNA, 120 bp, Homo sapiens
gtgcggccaggggactgagagagcttgtcaccagagccttcctgtgctgtgtcaccccacactggtaacattccagcctgcccctcgtcaagcacctcactctttctcctggtgatcaag

SEQ ID NO: 37483 - DNA, 120 bp, Homo sapiens
ccccgtgagcactcctagtgattaaggttaaggaattttgacagtagtattagctgtcgcatggcctccctaagacagaggaaagaaccaagaggaagcctggcacctacactctaaggg

SEQ ID NO: 37484 - DNA, 120 bp, Homo sapiens
tttcgcttgggatcaggatgtgtgagcctcagagttagaacagtgccccccgctcgttccccgtccccaacatatctcccattagggagcttgtgcgttgtgtcaggagctgagctgctc

SEQ ID NO: 37485 - DNA, 120 bp, Homo sapiens
ccccgtggtggagatgcctcatagagcctggaaggttgctcattgtcctctcccattgctatttggtttgctgctaactccagagtgatgagtctacctgctatgtaattcttagaactg

SEQ ID NO: 37486 - DNA, 120 bp, Homo sapiens
ttgcgaatggtcttttctcagagacccttcatctgcctacctcatgcttatgagcctggtggtgggattggagagaagagcaaaggtttcttttctgctcttccctgagcatggagccgg

SEQ ID NO: 37487 - DNA, 120 bp, Homo sapiens
ctccgtctaaaaagaaaatattcggggaacttttgcagggcagtgagggagccgctggaacccggctgggcggctggccccaggcacagatccttgatccaggctgctgcttggggccta

SEQ ID NO: 37488 - DNA, 120 bp, Homo sapiens
gtccgggtgggcgtggttagtcaggccagcagcttccttccctggaaatgctgattgtggtcaaggaactggaaacaaggaaaactagcaaatagattttggggagcttcttggaggcct

SEQ ID NO: 37489 - DNA, 120 bp, Homo sapiens
aatcgctgtccaaatgtgaaggcttaataatggtgccataatatgaggtgatcctttctttcctctttcttcccagtgggagtctcgggtgactcaatatgaaagggacttcgagaggat

SEQ ID NO: 37490 - DNA, 120 bp, Homo sapiens
gtccgaaaagaagtgatacggtttgaggtgagatagaaaatcctacttctcacttagcatgcagtgcttgttttgggagtactcttggtgttgtccaactctgttgggtaaagagagagg

SEQ ID NO: 37491 - DNA, 120 bp, Homo sapiens
tctcgtgagcaggcgtggccttctttgggggggtgtgtgcttgatcctaggaacagtggcaatcttacacttgtggctggaccacagcagttaaacacaaatcttgcagctgccatatac

SEQ ID NO: 37492 - DNA, 120 bp, Homo sapiens
cctcggtcccctgtcgtttctcctccacttcccatctcctgccctccaacaaagcctttcaaggccttggcagaccctctttggctggaaattacagctgttccacctgctgcctctact

SEQ ID NO: 37493 - DNA, 120 bp, Homo sapiens
catcgaaagggaaagcaaaaactggatggtcagtgtagaatcttgtctcctagaaagagaaatccaaggacttcaagaaccacgtgatcaagtaccttgagacactcctttactcacagc

SEQ ID NO: 37494 - DNA, 120 bp, Homo sapiens
cctcggggcttctgcaacaagatgtgcaggccctgcttctgaggggctgggccctcctatagtccatcattgaaaataggtcctgctgctctgacatggagcatccaacagggtctttta

SEQ ID NO: 37495 - DNA, 120 bp, Homo sapiens
cttcgaggagccaccccatggtaccacctggccctcctgaggctgaggcctcatcggtatgtgaaacagtggccccactgtgaggaactaactgagccaggcaaagctgtggccaccaca

SEQ ID NO: 37496 - DNA, 120 bp, Homo sapiens
tgtcgagagggaggtgtgaaggtcatgtggcctgtgcagctgctcggagcctgcctttgtgtggcaggcgcttggggagcgccagggtactgtgcttgattcctcccaggctggcttagg

SEQ ID NO: 37497 - DNA, 120 bp, Homo sapiens
tgacgctgcctttttatacactgtcctcctccaccttgatggacccctagtgatgcatcctgcctaggctggacttaaccccttcctccctgtccccacgaccaactgtccccagttact

SEQ ID NO: 37498 - DNA, 120 bp, Homo sapiens
aaccgttatttcatttagcttccatatatattttcttacctaagagaatagtttcctgctttaagcaaaagacctacaataggtggtggaattatgggatggggtggagtattgatataa

SEQ ID NO: 37499 - DNA, 120 bp, Homo sapiens
aggcgcatctagggaaatgtcaagtggcttggtgtagggtaaagtcagtgaggcccatggagaaaaacgagcaggagccacatcacatgggtgtctgataggacctgggaggcgctttcc

SEQ ID NO: 37500 - DNA, 120 bp, Homo sapiens
tgtcgcttcgtgatctggacacaccagaaggcgtgagactggaggcaggaagagcagccaggcttatccctaccctcaggagagctgaaaagggcaggtatggtggggccagagctcagg

SEQ ID NO: 37501 - DNA, 120 bp, Homo sapiens
tttcggaaccactgagatcggtccttgatttgatgagaggcttgaggggagagggaggtagctaggatgccccgcaagcttctggcccagacactgggcagacaatgaaaccctttgtaa

SEQ ID NO: 37502 - DNA, 120 bp, Homo sapiens
ggccgaagaggggaagtttcatgcttgataattaaaattttctgagataggaatgtcatatttacctatttaagccaagtttttttagataaaaggtatggaacctgctttccccttggc

SEQ ID NO: 37503 - DNA, 120 bp, Homo sapiens
cagcgtttgggctccggagtgctgaagatgaggactggacttcgagctggtgtgatcccagtattcagtgtcagtactcagtgacaaaataaatgagagaaacgggaataagaattgtcg

SEQ ID NO: 37504 - DNA, 120 bp, Homo sapiens
gggcgtgtcttttgccgagcacactcagggcccacgggaagcccatagacttcaaggacatcaagccccaaggtggtgggattttccccaccagtacttggcagcctagggggaagggga

SEQ ID NO: 37505 - DNA, 120 bp, Homo sapiens
gggcgggagaagataatggggatccctggctccaaacataggaggacacatctgtgctacagtgcgcacatgcctggatgtacactctgtctttggagacactggctaagattctctgct

SEQ ID NO: 37506 - DNA, 120 bp, Homo sapiens
gcctggatgtacactctgtctttggagacactggctaagattctctgctccatgtttggacagggtcgtgcctgatctgagataaatggacaagaacaactgaagcctgtcttctggtgc

SEQ ID NO: 37507 - DNA, 120 bp, Homo sapiens
agacgctgctccttcccctccctagttttttctcagcatacccccactgcccattcattcatatagtctttcaatcacaaatattatccatatagtctttcaacccaaatgtttttgaga

SEQ ID NO: 37508 - DNA, 120 bp, Homo sapiens
gataacagtttgtgctgcagggtagagaatggacgttctattggggatgaaggcaggaaaaaatggagactcacagacagaggggcagacagtcattaggatgaggaccaagaagtctga

SEQ ID NO: 37509 - DNA, 120 bp, Homo sapiens
gtccgtctctttaaaaaaaaaaaaaagggggggggggaggaatcttgtcattttttaatttgaggattagcttctcctttataagagagccaaatcagaagagtcactagattacaatag

SEQ ID NO: 37510 - DNA, 120 bp, Homo sapiens
tgccgtttacctaccctctaaaccctcaatcctctttcatttgctctggtccttgctgactcatcccctccctccctttttcctcccacttcagctgcatgcttggttctggcttattca

SEQ ID NO: 37511 - DNA, 120 bp, Homo sapiens
taacgaacatataccacgctgttgtcatgtggtcagctatggagtcattctcatactgtcactcttcctaatacggatctgtttcggccacagactctttcatatctctgccccaaacct

SEQ ID NO: 37512 - DNA, 120 bp, Homo sapiens
caacgcttcccaagctcacttcctggctattggttcctttattcttaatagaaaaggaactgcattacacagtagtttttggagctttatatttaaactcagccctttcaaagcagcagt

SEQ ID NO: 37513 - DNA, 120 bp, Homo sapiens
caccgtaagcttcatcagacactgcattatttcaaagaactaggagttctcagttctcagagccatactgataaaggaacatacagtctgtttagttagagctccagctgtcacattttc

SEQ ID NO: 37514 - DNA, 120 bp, Homo sapiens
tggcgcacagggcccagggggacctctggcgtctgtcgcccgtggccaggctgccgggaggacccccccgccctccagtaccacactcgatcgcctcaccttttctgtaagtgcctggaa

SEQ ID NO: 37515 - DNA, 120 bp, Homo sapiens
gtccgcaccatgttcaaacaagaagagaggagaggagagaacgaactgacttcccagccgagggtgtttcactggacaaggacccgaaaactatcccgccacagtttatattggtctctt

SEQ ID NO: 37516 - DNA, 120 bp, Homo sapiens
tcccgcgcgctccaaggtctctcccgagccaccgctcccattggttccgcgccgttccccctgaaccaattgccaatgcccagtggtgacagcggcgaggcttcttgcagcgcgaatccg

SEQ ID NO: 37517 - DNA, 120 bp, Homo sapiens
ccatcaacacgcaaaggcctaggattcgtaggcgccccaggtgggcggtaccaggactctccaggggtacccgactagtgggtgctaagtttctgaactacagaaatgagcctgcttaga

SEQ ID NO: 37518 - DNA, 120 bp, Homo sapiens
ggacgtgttattgggttgactttgtaaagattgttttactgtaactgtagtcattttgaaaagcatttgagtaactacattatgctcaaggagaacatttgtcaaaagtaattatctgag

SEQ ID NO: 37519 - DNA, 120 bp, Homo sapiens
cagcgaagaagtgacaaagtcctttttaattgcaatctagttattggtagctggagtgcccaggtccctttacttaatctcttaattttgtagtgttgtatgttatttctccacttatct

SEQ ID NO: 37520 - DNA, 120 bp, Homo sapiens
ttgcgttaatcgctaaatctctcactctgtggatgaatgggcaggtgatagtgattctttaatgaactgcatctggaagaggaaacttaagttgtggggaatatgtgagaagtaagcagt

SEQ ID NO: 37521 - DNA, 120 bp, Homo sapiens
aacttaagttgtggggaatatgtgagaagtaagcagtaagtgttaagtagatgccagattgatgttgtcaatgagtttttgctggagcatagtacattacttattgtttgctcggccatt

SEQ ID NO: 37522 - DNA, 120 bp, Homo sapiens
tgacggaaactttccctgaagagcccttggggaacaaatagaaacattatatgattaaccacgttgttttcattattaaacaaatctacaaaaaggagtagcaattaacagctttatcag

SEQ ID NO: 37523 - DNA, 120 bp, Homo sapiens
ttacgtagttttaaggcaaatttatgccctggggttagcgccaaagggcttgtcagaacattgcctttaatatctgaaatatataacttaaatgacatccaaggccttagctttggagga

SEQ ID NO: 37524 - DNA, 120 bp, Homo sapiens
aatcgggcaagattttctattgctattaaacaggagtttataaaactctaaaactactgtagacccataaactgatgaatgaactggagccttcctctttcacccacagaatccccaagt

SEQ ID NO: 37525 - DNA, 120 bp, Homo sapiens
ctccgtcttatgcagtgagtctagagagtaaacccgtagggagcaggatcccagcaaactaaggaagattacagaagaaatatatacgagtgccaaatcttgccccatctccctattgtg

SEQ ID NO: 37526 - DNA, 120 bp, Homo sapiens
caacggaaaaataaaaaactggtatctcaagaaataagtgtgggatagtcttcatacacgaacagggtcatatttcctctttatattcagaggaaatctcctgccccttaatactcaagc

SEQ ID NO: 37527 - DNA, 120 bp, Homo sapiens
ctgcgagctgacctatgctggggacttgtcatagatgatttattcttcacaactccacaaagaatcactaagtcagctaataagccacattgctgatattcattctcgggatctatttga

SEQ ID NO: 37528 - DNA, 120 bp, Homo sapiens
gagcgtttaataaattttctccttttctaagtttaccattcacaatatcaaatggtataatgtgttctggtagtttaaactgcaagtgtgatgtttccactaattgttgccagaaaacgt

SEQ ID NO: 37529 - DNA, 120 bp, Homo sapiens
tatcgggtaactgcataatggcattataatcaaaccttttgtctttttaatgcttgaccaattcaatactttacccttggaggagataatgccactggccaggaaacaggaagcaagtct

SEQ ID NO: 37530 - DNA, 120 bp, Homo sapiens
tctcgagaacataaatcggcatcttctttaaatcccatcatacaaggattccctgtaggttacaaggaatttacattatataaagcattttataatcgaagcatttctttcagcgtttag

SEQ ID NO: 37531 - DNA, 120 bp, Homo sapiens
ctccgcgccgcgggcccccgcactcccggaaccgggggcgacgtgtgtgccctgcatgcaaaagttcacgtcgccttgctgggtctttgactttgcacccggcgggaagggggagaccgg

SEQ ID NO: 37532 - DNA, 120 bp, Homo sapiens
ggccgagggggcgggatgccggtccgggcgaggttgcaggagatgggcgcgattccggcgggccggcgggtgggcggcgatgctggctcaattggagtggctcgttggtggcggcgatgg

SEQ ID NO: 37533 - DNA, 120 bp, Homo sapiens
tttcgcctaatctgatctaccccccctccgccccccgccttttgcaccctccctcggtcctgcagccggctggcggggctggcgggtttggcgttggtggagtggactcgggagggggag

SEQ ID NO: 37534 - DNA, 120 bp, Homo sapiens
taacgtgtcgttaatagaaagaagaacaggcaagaagtggtccagccggcgaaggttggtgtgtgcttgtgttgtgcctgtgtgttagtctttttcttaaaaatcttaatcaatggattt

SEQ ID NO: 37535 - DNA, 120 bp, Homo sapiens
agacgaatgcctttttgaaagcacgcattgtgtgcgtttctagaggagccgtgggcttgggaatgaacggcaggcttccccgttcggtggtttccagtgggaaatcactccggaaaggga

SEQ ID NO: 37536 - DNA, 120 bp, Homo sapiens
cttcggtatcgatttattgtttttgtcttccaaaccattatctctttgaccgaaatactgtctgagaagttccgcagggacaaagtcaggtaaactggaccgggcagatctttggcaaga

SEQ ID NO: 37537 - DNA, 120 bp, Homo sapiens
taacggggatgctgttttcagtgtctgtttgtgatggaagcattgttgggtaatagcaatttctgatcggtagagcatgctggttctaaaaaaataagttaactgccgaaatactgtctt

SEQ ID NO: 37538 - DNA, 120 bp, Homo sapiens
ccccgcccccccatccagaccgcttactacaagtctgaaatcggatccaactggaaatattttcattggagattgaaagttgtgcaattggaaatagatgaggctagaggtattgagagt

SEQ ID NO: 37539 - DNA, 120 bp, Homo sapiens
ttccgattcgtttccgtttcaaataaactgtcctgataatctcacggttgacatctaacgctaaaagggcaatttgtgtgtctctttatccctgcagaaactctcctccaaaagggcagt

SEQ ID NO: 37540 - DNA, 120 bp, Homo sapiens
tggcgttgattgtttttctcttacatctttttccttctttttcttttcattccttcactcttcatcctgtttttcttctttttctgtagatttatactaaaaactaatttcttgaagtct

SEQ ID NO: 37541 - DNA, 120 bp, Homo sapiens
tgccgatttggcaccatctcttaccctcctttagtaaataggtatatctcctgtgccccatccaaactcatcttcacgtgcaaagcatgtgtgtgtcgtgggagaaaggggatggggtag

SEQ ID NO: 37542 - DNA, 120 bp, Homo sapiens
gggcggtgttgtgtgcaggccacatcttcaacactggaccagacctgggcattccggggagagtttcctttgcacaccccagctgggatgggaaggcggagccaaccagacaggggcgtg

SEQ ID NO: 37543 - DNA, 120 bp, Homo sapiens
aggcgtgagctcttttgctctgacgagggattcccaggtgtcagagtgaaggtgaggtgctgtgttttcccctgtgcttagtctcattgcctgttcccagaaaagggtattaagacagag

SEQ ID NO: 37544 - DNA, 120 bp, Homo sapiens
agtcggaagaggaggaagaaatcaagtgtggttaaacagagtatttgcaaacggcagggaatgtagcccccaaagatatggagaccaggtacccagagtgttgcttggcacacgatttct

SEQ ID NO: 37545 - DNA, 120 bp, Homo sapiens
ccccgttaaggggacaaaaccaaaaccaaaacaaactattggtcttgggaagttgagttggtgttagacctgggctgtgggagttgctagccactatagtaacctgagctgagctggggg

SEQ ID NO: 37546 - DNA, 120 bp, Homo sapiens
gagcgaatgcaccaccgggagccagaggagggaaagggactcgtctctcttagctgggaaaatagatgtatctctggaataaacaaactggaggtgggggaggggatggcttgcagtgaa

SEQ ID NO: 37547 - DNA, 120 bp, Homo sapiens
tgtcggttaagaagggggccacttctagcttgggagaaaatatcaactgccttatatgttcatgaaagggctaggcaagtgaagggctgtaatttgatcttttgtatgttagcatcagaa

SEQ ID NO: 37548 - DNA, 120 bp, Homo sapiens
aatcgatacttgtctggcacaaaagtgtacctctaggagaggagagttctctcaatgtggtcattatttttagttgtacttcaatctctgctccaaagcttctatatagtatgcaaaagg

SEQ ID NO: 37549 - DNA, 120 bp, Homo sapiens
attcgtgaatgcagaaagatgatgccaatctacatttttgcttagctctgagttttcgttttccctttttaccgaactttctattagattttgatgcccccctgagatacatcacactgg

SEQ ID NO: 37550 - DNA, 120 bp, Homo sapiens
tttcgtaggttcagtccagaacagctgtttttagaaggttttttttttttttttgcccattagagggtaccatctaaggttgaagaaccattaaataattaattaattaattttttgtga

SEQ ID NO: 37551 - DNA, 120 bp, Homo sapiens
gggattacaggtgtgggccaccgcgcccgaccgaggaaccattattttttaatggccgttagcttagaaaccagcagttgacttcctaccctgttcatagcaaatgataccaggtaaaga

SEQ ID NO: 37552 - DNA, 120 bp, Homo sapiens
ccccgccctcgggccagcccctcactcacaggcgttcgcgcagcgccgcctcccgggccgcacaggcttcgccctcggcctccgccacgcctgcgcgccgcagagcctcgtccagccgcc

SEQ ID NO: 37553 - DNA, 120 bp, Homo sapiens
cacagctgagcaggggttgggggctctgggctgagcatcttggggtataccacaaggtccacagctgtgcttggcttcgcttttgaggagttttggttctgtttggagggtcttgggaaa

SEQ ID NO: 37554 - DNA, 120 bp, Homo sapiens
ggtagttctgtgatatatcatgacttctgtgtctttacatcctggtagagggggaacgtccggacctaatcattttctatgtgtgattttatatatatatatttaattttagtctaggtg

SEQ ID NO: 37555 - DNA, 120 bp, Homo sapiens
gcagcctggcttcgcgcctccgtttctgcatctggaaaatggggagacggagtggctgatctcccttccctctcctttctcctcctcttcttccctcctcttcctccctcaccccttctg

SEQ ID NO: 37556 - DNA, 120 bp, Homo sapiens
tctgggtgagcaagtaggaggtcttgggtgactcacagaagtcccgggattggaggctcaatgataatgggtccaattaaactaactaactttctttctttttgagacagggtcttactc

SEQ ID NO: 37557 - DNA, 120 bp, Homo sapiens
atgaccgattctcaacccggtcaggcccatatctccttttaaacaacaatcacctgatttcgaaagctcccctcctcaaaagaggatgatataacctactcaaggttggaattttttttt

SEQ ID NO: 37558 - DNA, 120 bp, Homo sapiens
gaggagaaggtggagggaggctggatggggcttctgctgagtggggcaggccaaattgactcgattggggcatgtggtgtcttagtcactcttttttttttttttttttttttttgagac

SEQ ID NO: 37559 - DNA, 120 bp, Homo sapiens
aggacttgggtgctggcatcctccacggagaagatgtggctcggggggaaccagcaggacaggtcctccgtggccagagcaaagagggagtggtacacaggcaggatgcctacaggggat

SEQ ID NO: 37560 - DNA, 120 bp, Homo sapiens
ggctcctagccccggccccggccccggccccgcccccacccccgcccccgcggaatcccaggctcgcgcgtgcgcactggcagcagggaatccccagctccgccgcagagagcgggaggg

SEQ ID NO: 37561 - DNA, 120 bp, Homo sapiens
cctgaagtcgagtccgggctaggcaggggaaagcgcaaaggtgcagcacgcaccctcggggattttctcagcgctcctcaccccccacgacctccaaaccctccgctatgggcctggccc

SEQ ID NO: 37562 - DNA, 120 bp, Homo sapiens
agaacagtaaaccagggcgacgtgcccagagaaggggcgactctagggaagaggcgaccttggatggagccctgaagagccctgtgggaacagggggtgaggagagccagggaagggcga

SEQ ID NO: 37563 - DNA, 120 bp, Homo sapiens
gtttggttaaggaacatccgtgggtgtaccttctgtgccagtggtagctcccaggtctgatggcagaggcacagtaaacccatagtacttaaaaaaaaaaaaaaaaaaacaccaaagcca

SEQ ID NO: 37564 - DNA, 120 bp, Homo sapiens
gtttgggcttgggggcaggagaagccttcccagctctgcagcggggcaggaccctaagcccttcccatcccctagagccgcgccctggtcggccagtcacggaggaagccatgcgaaagc

SEQ ID NO: 37565 - DNA, 120 bp, Homo sapiens
tcccagaggagggggccatttggggtgggtttcgaagaatgagtaggagttcaccagggaggaaaagttgtccaggcagctggggagcctcggaggctggcaggtgagtgaccagggccc

SEQ ID NO: 37566 - DNA, 120 bp, Homo sapiens
agaccctcatgtagggccccctgaggattctacattatctttctatgagtctcttctgtctctgtcctaaccccaccccactcaacttacacgaaacaggagaagcagcccctccttact

SEQ ID NO: 37567 - DNA, 120 bp, Homo sapiens
aaaaaacccaaatagggttggtgcagacccactctcacaacactcctcaggcccgctatagagtcaaggcagacaggctctgccacactggccgccacacccattcctgccacctgacct

SEQ ID NO: 37568 - DNA, 120 bp, Homo sapiens
agtgacttgggcccctgctacacatgttattaggctccaggtcaaggcacatggcatgctgcacgcaaggacaccactgtgtgcttcggccatggccaggctgcagtgtgtcatctgacg

SEQ ID NO: 37569 - DNA, 120 bp, Homo sapiens
gagttcgttaccctcctcagctcagagattagagggaactctccccacagagatgctatgatcagagggccagggaccctgtctcattgatcctacgctctacgccagacatcgcctcag

SEQ ID NO: 37570 - DNA, 120 bp, Homo sapiens
tctggttacacaatcaagttcttcaagccaccttcctcaagctcactacccaaaaccacagagagcacggagctgccgtgccttagaaaagtccatccactatactgccccatgggcaag

SEQ ID NO: 37571 - DNA, 120 bp, Homo sapiens
attatatatctcagatttgtctttcccatcagaatgtacctttcagaatatcttggaacatgaggtcaaggatcttgtcggatgggctgacagttgaatccccagcagcctctcagcacc

SEQ ID NO: 37572 - DNA, 120 bp, Homo sapiens
cacactcgcacatgctcatgcacacacctgcacacgcatgccgcaacacgcacattcacatggccgtgctcgtgcacgcctgcacacgcatgcttgcccatacccacgcattgcagcgcg

SEQ ID NO: 37573 - DNA, 120 bp, Homo sapiens
ccagcatccccgccagtggtttgcattattcaattggtgataagatttaaaattaaactgcaaaggatctgttcccccagctacaaatagacgtgtgcttgcacattccagaacacaagt

SEQ ID NO: 37574 - DNA, 120 bp, Homo sapiens
cagatcgggagtggcaccatggacctgcccttccaggtgagtgccccgccccctggccctgccccattgtggggagcttcccccagcctcccactgggggccagacattgaggacagctg

SEQ ID NO: 37575 - DNA, 120 bp, Homo sapiens
agggaacagctctcaaggcaggagttgaggaaggttatacctgaccacagagggcttagacacctggcagggcagtggggccaggaaggccgtgagcagggagcccacagtcagggctgt

SEQ ID NO: 37576 - DNA, 120 bp, Homo sapiens
gtgatgcttgactgtacttagaatcaacattgaaaaaccaggggaatgcccgtagaacaccagatttctggctgctcttgaagaatcagacagcccagtggccatggccgatgtcttgca

SEQ ID NO: 37577 - DNA, 120 bp, Homo sapiens
gcttctgtgttctgtcccacctgccctccggggtctggtggcgtttacagtgcaggtgccctgatgcctctgcacccttccccagaacgcagatgtcatctgctgcacatgtgtgggcgc

SEQ ID NO: 37578 - DNA, 120 bp, Homo sapiens
gtgcgtggtgagcaatgcccctgtggccaggtggtgtcctgtgcatcctggggcccctacttccttgctagtgtgtgttgaggctgattcacacctgagcttcttgacttgtgggggccc

SEQ ID NO: 37579 - DNA, 120 bp, Homo sapiens
ccgggttagcggcagccgcactcgtccaccaccatgtcctcatactgccgcagcaccacgttgtcgctgttgtcaaagaagagcacggagatgggcgacaggcgcgcgggcacgcagcag

SEQ ID NO: 37580 - DNA, 120 bp, Homo sapiens
ccagaggggatgcaggtggatgccgggtggggagggctgcagggctggctcctggcctctgtcctggcttcatggtcctgacagctctgggccagcctcaggcgctgggagcgtactgta

SEQ ID NO: 37581 - DNA, 120 bp, Homo sapiens
ggcaggagagacaaggggtaggtgggagggtcccccagtccctgctgaccccagtgtgtctccccggagatggctcctagctgagtgggacccggcaggagttggggacagtgctgtccc

SEQ ID NO: 37582 - DNA, 120 bp, Homo sapiens
cattcaatggctcccacttagtagacgaagtacttagtactcctaagtactaagtaggctaagtactcagactgaattcagacccttctgcctgacttaaatctgctgctagcactattg

SEQ ID NO: 37583 - DNA, 120 bp, Homo sapiens
tcccggaggccaaaggcagagttgtggaaaaggccacgatgttgggagtatctgaagtcctcatcaaccctttttgttcttgttgggacagaggagccctggcctccaagtttgtctttc

SEQ ID NO: 37584 - DNA, 120 bp, Homo sapiens
ggccggaggagcaggggctctacctggaggaagggcttcctgggaaaggggatgttagaactgcaccttaatagggggtcaggcgccaggaattcacaagggtgagaaaatctggagtgg

SEQ ID NO: 37585 - DNA, 120 bp, Homo sapiens
gcccggagcagtcatggaaggtgttggagaaagggcaggacaccatccgttctgcatgaatggagggttccaagacagagcagccactggcaagaggctgttgttcctggctttagctga

SEQ ID NO: 37586 - DNA, 120 bp, Homo sapiens
ttccggcatcctactagtgtctgctcaaacccaccccaggcagcaggggtgggggctggcggggaaactgggtcaccagcagaaggcctgtctcttcagcccctgcctgccagggctttc

SEQ ID NO: 37587 - DNA, 120 bp, Homo sapiens
ttccgcatttagacagagtctggtgccatccaaacccaacttcgctggtctcagggctggggctggaggtgacaggaaactgtgcccccaacctcacccccggaaggaagttagaaagag

SEQ ID NO: 37588 - DNA, 120 bp, Homo sapiens
ccagatctggttcaaatcctggctggaccactcattggctgtgtgaccttagaaaagcaccttgacctctctgagcctcagtttctcatctgtgaaatggggggaattctattaacggca

SEQ ID NO: 37589 - DNA, 120 bp, Homo sapiens
gctcgggggtgtcacacacctggactcccaccctgcgtgcctcttaccagctgtgtgaacaaggagtctccccgtctcgtccgtgcctcagtttcctctctgtaaatggggtaaaccagt

SEQ ID NO: 37590 - DNA, 120 bp, Homo sapiens
gaacgtgagtcctggagaatcaggcagggcgaggttcgaatcccagctctgcctctgtgcgtgaccttgggaagcgactttgcctccttggggctcagtttccccacctgtaaaatggga

SEQ ID NO: 37591 - DNA, 120 bp, Homo sapiens
ggacggcctcatcctggggcataatggggacgtttaacgcggttcctggggcaaagagaatgggaggagaatcgatgccatcttctcctgggtgcggtgagtgtccaaaaaatgggcggg

SEQ ID NO: 37592 - DNA, 120 bp, Homo sapiens
cctcgcgcagccagaggcctcgggctggcgggggcgcatgcgcagagagccctcgcggcccctttataagcactgaggcggcgctggggccagcggagcgcagggcgcaggggctggacc

SEQ ID NO: 37593 - DNA, 120 bp, Homo sapiens
acccggcgcggagctggctgagtcggagcgcagcgtcctttgtgcccggcggccgccccgggatgcgtccgagctaggagccaggtgggggatccgtgagggggccgtgttgcgggagaa

SEQ ID NO: 37594 - DNA, 120 bp, Homo sapiens
cctcgcgtctggcctctttcctctactttctctcccaaggacacccgctgcatcaggccacctgcctctcaccaccttttgtcccttccctgtcctccctcacttccctgcagccagacg

SEQ ID NO: 37595 - DNA, 120 bp, Homo sapiens
catcggatgcggcgacaccaccaccaccaccaacaccaccaccagcatcaccaccacaaatcccgcaaggagcgcagaaaacacaagaaacacccaacggaggactgggagaaggacgaa

SEQ ID NO: 37596 - DNA, 120 bp, Homo sapiens
cttcgcctggggagacagaacccagagagaaacaagagagtccagaagtccctgaaccccaaaccacatcccccacacacataatcctttgtacaaagctcctcttttccctttttttac

SEQ ID NO: 37597 - DNA, 120 bp, Homo sapiens
tctcgtctggctgaactctgggagtgtgtcccagctgagggaagcacaagtagcaaagctcattggtctggtctcttgtttgccaggctgattgaagcaggccttgatgagggtgcatga

SEQ ID NO: 37598 - DNA, 120 bp, Homo sapiens
ggacgtagggtcattagctttgggaatagaaggctacacagaagcacactgtttttgaacttgacaacagctctccctttaccctggacttcagcccaagttccgtctttggtcttggtg

SEQ ID NO: 37599 - DNA, 120 bp, Homo sapiens
ccacgtactgcattttagggatgtttttaggacaacctccctccatgccttcagagttaggagtgagaatgatcaaagcaatatgtaggtgatggagggagagtgtattgctaacccttc

SEQ ID NO: 37600 - DNA, 120 bp, Homo sapiens
cagcgctgagatttggtggttctgcatgtgtgatgaatctctttcacacaaatagacgagaggatatttagggctagatgagcccagatttcttccccctccatctctcagggagacaaa

SEQ ID NO: 37601 - DNA, 120 bp, Homo sapiens
ctgcggtcatattgtagagagatgctcagtgttaaaactgaaacacacaaacacacacacacacacatttttctcttgtagattttaattttttaagtgggaaagaactcaccttgcctt

SEQ ID NO: 37602 - DNA, 120 bp, Homo sapiens
gtccgggtaaaatctgtggatcagggttaaaaaagcaccgtggagaatggccctcttcaggaaagaaaaataagcaaatgaatggtccacctaggggttcagtaaagaaagaaatgtgtt

SEQ ID NO: 37603 - DNA, 120 bp, Homo sapiens
ccacgaagacgtcggtgaaggccagcgggtccaccacctttgtccacttgagccggacgccgtcgtgaccgtgggcggctgcctcatagtggtagcggcagggcaagacgatggtgccac

SEQ ID NO: 37604 - DNA, 120 bp, Homo sapiens
ccacggtggcttaccacctgcccaggcgctgtctgtaccactaccgagcccgactcaccctctgaggacaaccaagcagggttcagaggaggggcctaggggcagaagggggcctctggg

SEQ ID NO: 37605 - DNA, 120 bp, Homo sapiens
gaacgtgggaagactcgggtgggggtcggggaatcagaagggtccaggggctcagggagagggcgaggggctcagatggggagtggctgggggaaccgcggacgtcaggaacgccctacc

SEQ ID NO: 37606 - DNA, 120 bp, Homo sapiens
acccgctacccctctccgcacttggccacttctgcttttcgcggagaagaccacttttagcggccctgactcacccagcacgtgcacgaccttcttccggccacgctgcgcccccgcagg

SEQ ID NO: 37607 - DNA, 120 bp, Homo sapiens
ggacgccccaggccgcggcccagagcgcgccgggaccgagggccgcccgagcgcacacctggggggcgggcacggggcgctcagtccagcctcccagccttggcttttcggaggcctggc

SEQ ID NO: 37608 - DNA, 120 bp, Homo sapiens
cagcctcccagccttggcttttcggaggcctggctccctcccgggcctgccttccccacagcgaggacctctctcacgcccatgtccccaccctttccggggtcctggagaactccccct

SEQ ID NO: 37609 - DNA, 120 bp, Homo sapiens
ccccggccctccccctggcagctgccccgccccttcgcccctcaccatcgacaccctcgtctccaatggccgtcccgctactcagcctcagtttccctcactgtcaaaggctgggacaca

SEQ ID NO: 37610 - DNA, 120 bp, Homo sapiens
cctcgggatgcttctgctcttaggccaaggggtgcgccctggaggtcctggcgtgccccctctttcccctgcctccacaacttcgttctaaggaaattttctcctggactctgcgcttct

SEQ ID NO: 37611 - DNA, 120 bp, Homo sapiens
cctccacaacttcgttctaaggaaattttctcctggactctgcgcttctaaacctctgcattccccagagtttcccatccccacccaaagatcaagtcggcattccctgtgcgcacggat

SEQ ID NO: 37612 - DNA, 120 bp, Homo sapiens
tgacgcctgccctgcgggaccccagtctgcagctggcacaaattctaaccactgcccctacctcaggccccattctgcacgcagccccttagcttgatgccaactgggtcacaggtcttc

SEQ ID NO: 37613 - DNA, 120 bp, Homo sapiens
ggccgcaggtctgactcagcctccttccccaggtgtccactgcccatgggtgaagttcaggttcccctggactttccccaactctagcagggtcaacaccccccaggcctgctttctgtc

SEQ ID NO: 37614 - DNA, 120 bp, Homo sapiens
aagcgggccccagcatcccctcctccaggcagccctgcctgccacccccaccccaccttctccacacaaggccagggtgcctgtgcccagctcagcctaggggcttggccttgtcccgtg

SEQ ID NO: 37615 - DNA, 120 bp, Homo sapiens
acacgcacacagcacttggaggcctcgtcccctggcaaggggtaaagtccatgccctgagcctggtgagcctccaggttgctgagaactgagaagtgacttggatggctgaatgcctggg

SEQ ID NO: 37616 - DNA, 120 bp, Homo sapiens
ccccgctgtgctcagggtcctggcccactgccttctgggcagccctcattcatgggcacccaggccaagcccaccaatgttactctttgctctgcctcagccacagcgtcaggaaagaac

SEQ ID NO: 37617 - DNA, 120 bp, Homo sapiens
gaccgccccaccacggctccctggttcctctcagtagcagcctcagacctcatccccagcagcctggctgactggagtagatcttgtccacctggtccccacacttggcacctagtgttt

SEQ ID NO: 37618 - DNA, 120 bp, Homo sapiens
gcccgactccatgccaagcatgtgaatagggagcccctggtgcctgcaggggctgggcagcacccactgggtgtgtgtggagggggtgggggcagatggaaatgcaaattcccagggccc

SEQ ID NO: 37619 - DNA, 120 bp, Homo sapiens
actcggcagctgcagcttaacaagatccccagggtgacttaggcacaaatgtggggctctggccctggggcagatgtgggggtcttggcacacactgtggcctgggctaccctcctgcct

SEQ ID NO: 37620 - DNA, 120 bp, Homo sapiens
ctccggctctgaggcccttccttctaggagctgcctgacatgttggcatggcacatccatgcatccatgcggctgtcccctaacgacacaagccccagggactcgtgtgcctaccacact

SEQ ID NO: 37621 - DNA, 120 bp, Homo sapiens
ggccgtgccagcaccacctgccaggagagcacatgggtgtgcccagaagccacctgcccccacaggtctgagggaaggtggggccctgcctggagacccctccccaacctccctctgcag

SEQ ID NO: 37622 - DNA, 120 bp, Homo sapiens
tgacgaggggggagtcggtctcactgtcttggtgagacacactaggtgggagagaagtgtgtgaggctgtggtgagctccaggctggaagctagcagaaaatatatccagcttcccctgg

SEQ ID NO: 37623 - DNA, 120 bp, Homo sapiens
catcggttccctttcatccttcaaagatgacacgttcttttttaaaaaataccattatgagctctgatttaaacacactgggtgggtttcgatccatggcaactagtgtcatcatagaag

SEQ ID NO: 37624 - DNA, 120 bp, Homo sapiens
ctgcggccggtggaacctcttcaagctggctcctgagggctctggacatggccccaggagtctctgatggcctccttgccatctgccaggacaggcgctccaagatcatctcatacactt

SEQ ID NO: 37625 - DNA, 120 bp, Homo sapiens
agtcggtttccatgagaaactgcatctccagaccagcatctgggagctagggatgctcaatgccacaggcttaatcattatttcggggccttttcagtgaacagagctataaagatatat

SEQ ID NO: 37626 - DNA, 120 bp, Homo sapiens
atacggattagcctccccactgagccatgtggaacttgcttttgcatttttcccttggcctgtttctgaggctgtgagtttgtcagctactacacagactgcagtccttgtaggagatgc

SEQ ID NO: 37627 - DNA, 120 bp, Homo sapiens
tctcgctgccagcaagtgcctggcaactgggcaacatgccagacctgtggctaatcttattccccttgttgcttgggctgctgggaatgggggagaggtggggagtgtgtagcccaacga

SEQ ID NO: 37628 - DNA, 120 bp, Homo sapiens
tcccgagagcattccgtgactgtctttcaccctaggtcgccctcctgccatgggcccagcaacaatcctgacctggttgctgtttacaggaacaggtgcgtttctgaggccatgcagaca

SEQ ID NO: 37629 - DNA, 120 bp, Homo sapiens
ccccgagatggccaataccccttgtaatgcagcagttcccaacagggtacccttggagctgctggggcacccctttaaggaaaggacacacgccagctccattctaatggcccgggggcc

SEQ ID NO: 37630 - DNA, 120 bp, Homo sapiens
atccgctcggacacacagccagaagcaagggatctcaaggctgtcatggcacaactccacagtcgcttcagtctgtgctgtcagggtgatgtgacctcaccggctagcccttcacacagt

SEQ ID NO: 37631 - DNA, 120 bp, Homo sapiens
actcgtcctgaatgtggacagggctggacttgctggcaatgctgtcaccacagccacccccctttgccctcctacactgggcggtctggacaagctcacccgtgaccagtgaccgtcctt

SEQ ID NO: 37632 - DNA, 120 bp, Homo sapiens
cagcggaagagccttagaagctcctcctagaagggatgtgaggatgcccttttggagcaaatgcgagaagggcgtgcgcccctgccttggctgggatgagccgctgtgtgagtggaagat

SEQ ID NO: 37633 - DNA, 120 bp, Homo sapiens
tcccgctgctcccaagatgaagcccacgcgctgatgcccagcaacaccccagccccgcccctcaccctcctttgctctcctcacctcagagggcctgaggctcagctcagaggtctggtg

SEQ ID NO: 37634 - DNA, 120 bp, Homo sapiens
agccgaaagcacccatgcccctggcagcacttgccctgcccaccacagatcccacctgctagagcacgggcactggtggtgggggagcagcagctcccacaacttacctttgatctccag

SEQ ID NO: 37635 - DNA, 120 bp, Homo sapiens
cccacctgctagagcacgggcactggtggtgggggagcagcagctcccacaacttacctttgatctccagccactgctcatagtcctcctcctcgtcctcgtcaggggactggaagacac

SEQ ID NO: 37636 - DNA, 120 bp, Homo sapiens
gctcggttgttgggggactctgaactcggccttcccggctgcagtggaggggccggcaggctccaccacgtggggcacctctcctgtcctgggctccacccatacttctgcactggggac

SEQ ID NO: 37637 - DNA, 120 bp, Homo sapiens
aggcgggtggccggcccccggcctctctcttccatgacccagcctgccttccgggccaccacttagccacctcccatgacacctatgcagtatgtggaccctgggttgggagttcctcca

SEQ ID NO: 37638 - DNA, 120 bp, Homo sapiens
gtacgcacagggaagagctcccccagcagccaggagttcccgaggccctcctcccccaggcctgatgagaagctgcatacacatgctgtgtccttccatctccccacgcactcttgtgcc

SEQ ID NO: 37639 - DNA, 120 bp, Homo sapiens
ggccgtgagtcacctcccctgggccacagagttggcaggcaccatgtgcacgcacacccaagggccgagctcttcaccacagccccataggtattgccttgcagggtcaagccaggcatg

SEQ ID NO: 37640 - DNA, 120 bp, Homo sapiens
tgtcggccctggaacacactagggacaccccactgaagacagaccccacaaagcactcagaacagccttaggtgctcacacagccttgggggtctgtgccgtgagccttggctgctggtt

SEQ ID NO: 37641 - DNA, 120 bp, Homo sapiens
tccattaagtttagatagtgtccactgcaggcaccattcagtttagatgacatatatactacaggccaactggagctgtgtacccaaagcaattagcgttgataagataatttggttaat

SEQ ID NO: 37642 - DNA, 120 bp, Homo sapiens
ccacgtgttttcaattctcctgggctttccctgtgtctttattgtggacagacagggccgctcagcacacacatatggtgtgaaggccctcatgtcactctcaggttagttccccatgag

SEQ ID NO: 37643 - DNA, 120 bp, Homo sapiens
catcgatgcctgggctccttctgccccatccccaccagttcagcaccaggcagccttttcactcaaggtagactctgcttatccttcatcatcagcttggacatcatcttctccagacag

SEQ ID NO: 37644 - DNA, 120 bp, Homo sapiens
aaccgccactgtcattgacaccagagtgctttagctcttctgcttattacccttcccactggtattaattagccatcattcctcattgccagtgggcactgcttcctttgtccaagggta

SEQ ID NO: 37645 - DNA, 120 bp, Homo sapiens
ctccgcctcccttgtctcttgtggagtggcctggctccgttcccatttccctatttggatgtgaatgtcacttagccagtttgcccacatgatttcccagagccaggaagggaaacgcct

SEQ ID NO: 37646 - DNA, 120 bp, Homo sapiens
tcacggctaccaccaaggaaaagaaggcacatccttggcgattctgtcacgtggtatctctttcttctttctttcttttttttttttgttgttgttgttcttgtaggttgtttggtctgt

SEQ ID NO: 37647 - DNA, 120 bp, Homo sapiens
acccggccacttacagctgaatcctaaacttgtattgtctgaatctaaaattgggcccatgtgcaggaatggtgacatgaagggaggcgaggtctaagccctgttgagtccttgtgcaaa

SEQ ID NO: 37648 - DNA, 120 bp, Homo sapiens
tcctggggcccagcggggcctcacagggggtctctgcacccttatttgtccctgaggcctgtctcgttggccatcttttattcttggggtgcccaagcctcatgtgcagacttggaatcc

SEQ ID NO: 37649 - DNA, 120 bp, Homo sapiens
tatcaaacttcgcatttggagcaggcagtctgtctgggaaaagccaggaagctcgccatgaaggcatcgccctctgcttttaacttttttaggctctgttacctctgcactggcttgagt

SEQ ID NO: 37650 - DNA, 120 bp, Homo sapiens
ggatgtacgtatggagggcgggtagggcagcagcccctctgaggacaggtggccagaacccaagcggcgaggtttgttcacagcctccacagggtggggtggggccatccgcagagggtc

SEQ ID NO: 37651 - DNA, 120 bp, Homo sapiens
gaattgtttttagaattgctagtaaatttagtgttggggaaaaatgtactctgtggctgctaagatgaacaagcctcagctccaccatgaacctgcttccctcagggtgagcgggagatg

SEQ ID NO: 37652 - DNA, 120 bp, Homo sapiens
tccctctcccccaaggccgtggccttgggagcccgtggatcccagtgagtgacgcctccaccccccgccctactcgggcagtttaacccttgttgttcacttgcagacatcgtgaacacg

SEQ ID NO: 37653 - DNA, 120 bp, Homo sapiens
ggaataagagcaatgacccagaggacaagctgaggctgggtgggggcagggatatcccagccagatctctccaagtcagcctagtccagtaccccctcgttccctggggacctgatagcc

SEQ ID NO: 37654 - DNA, 120 bp, Homo sapiens
tactgcctggccacgtagctgctccgggccctgaccagagactggacgtgaatggtgagcacgtcctcagggccttcctcttcagggtcgtcctcccttccttcctcctttccttcaagg

SEQ ID NO: 37655 - DNA, 120 bp, Homo sapiens
ataggcagctaaacaaatacattaggccattgaccagaaggccagggtgttattaggaaggagggaggtgggcagggaggcgcaggtgccctgcccaggcaagagcaggaaggaagggag

SEQ ID NO: 37656 - DNA, 120 bp, Homo sapiens
gtatggatgaaccatagttcatttaacccatccactgacagccatttggactgtttccagttttgccctgtgacggacaatgctgcattttacatcctcgcctctctctctttgggactg

SEQ ID NO: 37657 - DNA, 120 bp, Homo sapiens
gcctcagtctcctgagttattggaattacaggcataagccactgcatctggccccctgagttactttcgtcatcacgctgtgagatcattttttcccatcacttgtccacgagatctgtg

SEQ ID NO: 37658 - DNA, 120 bp, Homo sapiens
gacacgcgtgcacagccggacacgccggccgggctcgacaccccgcgcacacccgatggccacacgggcagggcgccgcacacgccggcaccgggcacacatagggccgcgcgggcgcac

SEQ ID NO: 37659 - DNA, 120 bp, Homo sapiens
cacaccttccggaggccaaacgggcagcccagctgcggcccgaagggggaggggctcggccgcccggcagatggcggcatttacatacagctgggagccccctcttgaggccgagctcct

SEQ ID NO: 37660 - DNA, 120 bp, Homo sapiens
ctgcgggactgagaacgattcagggcccaaggtagtgggtggtggggccaaataggttggagatttgggatctgcgggcacagggggtggagacatcagagaaggcttcctggaggtggc

SEQ ID NO: 37661 - DNA, 120 bp, Homo sapiens
cacagcagtccctcgacaaataatgatcaagtaaatgattaaggcagcacaaagagaacacataaaagacaatgattgggggccaagcaggggtcgatatgagccatcacagggaaagga

SEQ ID NO: 37662 - DNA, 120 bp, Homo sapiens
gcccccacagggacgctggcaggatccaccccataaacagtacagtctgggatcaacgacacagctctgtggatcctgggatatcccccgtcatctttcattctcatttttcttggacat

SEQ ID NO: 37663 - DNA, 120 bp, Homo sapiens
atttggttggctctgatggcagcaccacatgattatattctttacagtcttcatctgtcaggacacatgttcaagtatggatgagtgaagtgacgtgttgtctaggacaggccttaaagt

SEQ ID NO: 37664 - DNA, 120 bp, Homo sapiens
tcacatgggaaaactgaggcccagggagagagccacatgcacacagtcacagcgagtaggtgcaggagagggaccgcaaccagagcagaactagcccacagacctttccataacgacaga

SEQ ID NO: 37665 - DNA, 120 bp, Homo sapiens
aaaggggttaggggaggagacggggttgtaaggggagggactgcgtcggagtgggctggagataacttgagttgtgattgagaggcgggaccaggatcgtgggggcgtggtcaggtcggg

SEQ ID NO: 37666 - DNA, 120 bp, Homo sapiens
gatactgttactgttccagtttacaggtgaggaccccgaggctcagagaagttaagtaccttgcctagagtcacacagccacagagcggtaactcttttttcttttcttttcttttcttt

SEQ ID NO: 37667 - DNA, 120 bp, Homo sapiens
atctggcgttacgtacagctagatttaaatctcacttacttgcctgttgtggcctcaaacagtgaatttacatccatgagaatcaatttcctcatctgccaagtacggatcctaactcaa

SEQ ID NO: 37668 - DNA, 120 bp, Homo sapiens
tgttctccacacttctccattgtcgggtttctgtcggtctgatagtcaacacacatggcctcagattgcagccttgactcccagtctagatgccttctaattccagagaccacgttcatc

SEQ ID NO: 37669 - DNA, 120 bp, Homo sapiens
ggagggggttggtccaggcctttctatgatcacactgtccttccttggccagattgaaaactgggtgacagagggtcctagtgaagacgaggccgtgtgcgtgaactgccagaataacag

SEQ ID NO: 37670 - DNA, 120 bp, Homo sapiens
tccagtgacttccctcccaaagcccagcaccttgcctgttcccctagaagaaggtatttcctttcccttctaggtcctggggcctggcagcggccattcccgtctctcagctggctggac

SEQ ID NO: 37671 - DNA, 120 bp, Homo sapiens
cataaatagggccccaccccacccaccactccgttaaaatgtttcttctcataaggcaagcatcccaatttaggcctccgtgtcatctgggatgacagaagccagatgctggatgagtgt

SEQ ID NO: 37672 - DNA, 120 bp, Homo sapiens
aaggccctgtgtttggcccgtacagttctacgttaaactggtgccaaagctcacgccttcctgttccgttccttccaggtcatctcagaatctgcaggcttgtggggcagggtagggagt

SEQ ID NO: 37673 - DNA, 120 bp, Homo sapiens
atacgatgttttgacttctcttgtctaaggagccctctagctgctatgttgagaatagtctggaggaagacaaaattggcagtgggagacccactaaattgctgtttgccacgtttttaa

SEQ ID NO: 37674 - DNA, 120 bp, Homo sapiens
aaacgccatagcaacgacccagaagttaccacccatttctatggcaatgatctggaagttgctgcccttttcctggaaacttgttaaataactcactccttaatttgcattaatccacac

SEQ ID NO: 37675 - DNA, 120 bp, Homo sapiens
acccggggctcgcccttgaattctttcccggtcaaagccaagaaccctcccagcctaagcatcatgttgggggcctgtccatcctgcatcagtttttttgttttgtttttgttgctgttg

SEQ ID NO: 37676 - DNA, 120 bp, Homo sapiens
ctgcgctcctgggggagcggagccgaatagacctgagccctccttgctaaagcgtccacccccaaggagaaatagtccttcccatgccctctgtcccgggattagacagtcttattgcac

SEQ ID NO: 37677 - DNA, 120 bp, Homo sapiens
gcacgggaatcactggacccttttccttcacacccactatgccaactgtgggcacatccttccgacagccctgtatgcccactgtaggcgatccccgccatgaagcccctcatcccgggg

SEQ ID NO: 37678 - DNA, 120 bp, Homo sapiens
cccactatgccaactgtgggcacatccttccgacagccctgtatgcccactgtaggcgatccccgccatgaagcccctcatcccggggtaggaaggatacctcctcacggttttctgctc

SEQ ID NO: 37679 - DNA, 120 bp, Homo sapiens
gggcgacagtgagaccctgtctcaaaatcaaaacaaaacaaaacaatcagggagcatttggatctgggaaaataaaaggagctagaagagcattttgggcagaggaagcggcttggcaca

SEQ ID NO: 37680 - DNA, 120 bp, Homo sapiens
gaacgtggtgggagaggacagtgggaaggccagctcgtccagctcacggggggtttggtcaacctggggatatggggagcctcagaaggactgaaaggatggggtaggagctaggaatca

SEQ ID NO: 37681 - DNA, 120 bp, Homo sapiens
cctcgggagtcctccaagcaatgagggtgagacctaagctggggcctgggcggtggggctgaaaaatagatggactagacagagaggatcaggaagcagaaaggataggacatggtggtt

SEQ ID NO: 37682 - DNA, 120 bp, Homo sapiens
tgacgggcttggaggtgagagacagggaagtgtacagggcaaagtccaggactctggcctggtgaccaaagggacagcaagacaaacagtgtggagaagggagttgctgaggtcagccag

SEQ ID NO: 37683 - DNA, 120 bp, Homo sapiens
caacgtctatctcataaagttgttgagaacattcaaatccataccaagaatgagaaataacataccaagtgcctggaatactgcctggcaccgagcaaacactacataaatgtcagctgc

SEQ ID NO: 37684 - DNA, 120 bp, Homo sapiens
ctgcgaatatcattaacacagcaggcctctactgcattcccaatggatgtacagacagacgcagaacaggcgcccagcaaccgtttgcagaagttactactcaagagttattaagcagta

SEQ ID NO: 37685 - DNA, 120 bp, Homo sapiens
gaccgagggaggagagatgatggtggagtgttggagtggtggaagagacagaaaagggatcaccccaaacaggagatggatgataaccttgaagtatggagcaaatcattttttttcttt

SEQ ID NO: 37686 - DNA, 120 bp, Homo sapiens
taccgtgcctggctgagcaaatcatcgtaaagaggagaagcagagacagggagggggagatgtggatgagtaaaatgaaagggaggccgggcacggtggttcacgcctgtaatcccagca

SEQ ID NO: 37687 - DNA, 120 bp, Homo sapiens
aggcgactttgggtgcagggagaaaacactggtcgggagaggctgtgaaaggaaagtgagatcgaaaatcacccagccagcgttggtgggttaaggaaggacctgaaaggcttgaagaga

SEQ ID NO: 37688 - DNA, 120 bp, Homo sapiens
tcccggcatagaagaggaaacgcaccctcgggaagggaggagagagagctgggggacccctcgatggagtgaagggggaacctgtgaattgggtaggaagagaccaccacatggtgggga

SEQ ID NO: 37689 - DNA, 120 bp, Homo sapiens
ggccggggagactggaagaacccaccttaaacaagacctgaaaatagccaagaggggcagcaagagaccctcgttgggaggtctgaggagtgaccatggcaggatctgagagaggaggat

SEQ ID NO: 37690 - DNA, 120 bp, Homo sapiens
gaccggggttcattggaagagactacggggtgggcgggggttggcggggagttgaggaggctggaagagaccatttcacgaaggcatgggggtggccataggcggcctgaaatagagtaa

SEQ ID NO: 37691 - DNA, 120 bp, Homo sapiens
tcccggaaggacagggagagaggggtggccgtgggtggggtggggtggggtggaagggaccacatccagcaggctgaggttggcaatggggagctggaagagaccaccaaaggccgacta

SEQ ID NO: 37692 - DNA, 120 bp, Homo sapiens
ctccggcgttatatccaccaccatgggccccaaggaccacatggtaaccagctccttctgctgccagagcgacggctgcaacagtgcctttttgtctggtaagaagcccgtggtgtgtgg

SEQ ID NO: 37693 - DNA, 120 bp, Homo sapiens
tcccggggttgttgggaggttgggggaacggcttaaacatccctattcaccttacacttcatcctcatcctcagttcccttgaccaatcttactgagaatggcctgatgtgccccgcctg

SEQ ID NO: 37694 - DNA, 120 bp, Homo sapiens
ctgcgagcttcagggacaaatgcatggggcccatgacccactgtactggaaaggaaaaccactgcgtctccttatctggacacgtgcaggctggtgagtggtgcctgaatctctggaaaa

SEQ ID NO: 37695 - DNA, 120 bp, Homo sapiens
gttcgatgggaggagagggttccagagaagtgggtgaggatgtgttctgggattatgaggaagaaggggctgaggtccctgattccagtctgaaatctccctttcaggtattttcaaacc

SEQ ID NO: 37696 - DNA, 120 bp, Homo sapiens
atgcggggctgtgctacagagagtatgtgctttaccaagcctggtgctgaagtacccacaggcaccaatgtcctcttcctccatcatatagagtgcactcactccccctgaaaagctatc

SEQ ID NO: 37697 - DNA, 120 bp, Homo sapiens
ccccgtgtgcctataaagaagttaatagagcaagcctgagtccttgtggtgtgatgtatcttgatgagatagaatgcaggaaatagggggtctcaatcctcatttcaaatcccctccttt

SEQ ID NO: 37698 - DNA, 120 bp, Homo sapiens
cctcgggccattgcatttactgtccccacagacagccacaaggctcactcctgccccttctctaggtctctgctctgatgtcatctcagtgaagccttccttgaccaccctacttaaaac

SEQ ID NO: 37699 - DNA, 120 bp, Homo sapiens
caccgcgcccagccacaatttgtatattttacttaaatacttgattactgtcttccccattataacctccacaaagggagggggtttttgttcattgtgttgactgctatatttccaact

SEQ ID NO: 37700 - DNA, 120 bp, Homo sapiens
caccgtgagcgctgacttaatgatggccattacagtaattcaggttctattcttgaaggttcttagtctccaaccttctatgagttaacacatgtaaagcgccttagaacagggctggtt

SEQ ID NO: 37701 - DNA, 120 bp, Homo sapiens
cttcggcgccaagcttctgtgaattacgaattagtacttcccatctctgagcccaagttttggcaaggctgtaaagagctggtcctttgctaccctttgacctcatccctacagctctcg

SEQ ID NO: 37702 - DNA, 120 bp, Homo sapiens
ccccggcttcagatctgtcaccttctcagggaggactatactctttaaaattgcaacctccttccagaacagttctcccttcagtccttttttaaatttttttcttgcaacaaattcctg

SEQ ID NO: 37703 - DNA, 120 bp, Homo sapiens
acgctccagaccttgccattttcctggctgctgctcactcctgccacaccccggtcagacactgtcaggccacaattccggctccatccacccacccacccgagccaacgccaaagcagg

SEQ ID NO: 37704 - DNA, 120 bp, Homo sapiens
ccccgcctcttgtcctccaagctacgcccctcccctaaccaagcccacgtgcctcctcccaaagctcttccctctttcacgctcatgctttctcgtctatcaatccatttaattgctata

SEQ ID NO: 37705 - DNA, 120 bp, Homo sapiens
aggcgtgagccaccgcgctcgacatcaaccactacatattgaatgtccagtgtctgtgaaaacctgtggctcctctccacatataaacaacctctcctaagtcccacctcctccccatcc

SEQ ID NO: 37706 - DNA, 120 bp, Homo sapiens
actcggcccagggtacctttcagctccttgcggtcccggtaccagcgcagggtggcagccggacgggaccgcggaacgaggcagctgagctccacctcgccgccctctaccgcctgctcc

SEQ ID NO: 37707 - DNA, 120 bp, Homo sapiens
tcccggacctccaccacaggattctctggggccactgccgcagggagaagggaagtaaggggttaaagaaggcacgaacgtgggctcaaagcgatcgagctgcctgttcccagcgaccat

SEQ ID NO: 37708 - DNA, 120 bp, Homo sapiens
atgcgtctgacaagggggagggcgttacctagtaccgtgagcgtggcaatctggtggtgggtgtcttctgtgtagagctggcagaaatagcccccctcgtcctccaggcgggcatctgag

SEQ ID NO: 37709 - DNA, 120 bp, Homo sapiens
agccggatccgcacccggcgtggggagaactcctcaagctggaaacgctcatccttcaaggctagagagagtgagggggaaggtgtgaatttcgggagtcctggcctcacaagtcccacc

SEQ ID NO: 37710 - DNA, 120 bp, Homo sapiens
ttccgacaggagcttagagtccagccctctgcctcttttctccagccatatctatgagtctgaggtgtccaactatttactcccttgaggacccagcattattcaagtcctcctgcctgc

SEQ ID NO: 37711 - DNA, 120 bp, Homo sapiens
gtccgggaccccagccctttcttctccgagacccaggagaccaaactctcaggtgtgtcctctttcaggacatgggagcctgggccccagccctctcttcctttaagactcctgagtctg

SEQ ID NO: 37712 - DNA, 120 bp, Homo sapiens
ccacgggtgccattgaagaagagggtctgccgggctgggttctggatgacaactatggacccatcatactggtgcagacggcaggtgatctcagccaccccaccctcagccactgtcacg

SEQ ID NO: 37713 - DNA, 120 bp, Homo sapiens
ggacgattagacaaagagacaggatagaagacttactgagagctgcaattcaattttttctttctccctcttccccatccaaacctccaatccctctctttcccctcattcattccattg

SEQ ID NO: 37714 - DNA, 120 bp, Homo sapiens
gcccgtttgcaaagatagccgtaatattctcctgtccctggacatgccctttgcaagttgattttgccattcctcccattgagaaggcactttgtcccctactagtctgggtaagccttg

SEQ ID NO: 37715 - DNA, 120 bp, Homo sapiens
agccggcagccagcaccaatcgccagctgtgtgagtgtggccatcctggatcatccagccccagctgccccaccagctgacagcagccacacaagtgaccccagttgagaccaataaaag

SEQ ID NO: 37716 - DNA, 120 bp, Homo sapiens
acccgcctgtataggactgtgatatgagcaagaaatatacctttttgttaagccattgagatttcaggggtgtctgttacagcctttaacctaccctgattaatccatcagaaaaacaag

SEQ ID NO: 37717 - DNA, 120 bp, Homo sapiens
tttcgttgagtttcaaacaatgtatgtcaggcctaaaagtggatgccaaggcagcaagtatattgtaacacatttatgacaggcatgcagagggattggagaatgggtaactcagggtga

SEQ ID NO: 37718 - DNA, 120 bp, Homo sapiens
ccacgttctgaagctggagaactaggggtcaggcaacccatggcaagtacagcccagccagccctcagccagttcaagatactgatgctgtcgtgagaggcagccagggctctgacggag

SEQ ID NO: 37719 - DNA, 120 bp, Homo sapiens
gcccgcaagatggggaatctgccagcagttgctgccaagttgcaggccacactttgttcacgggagaatgcaggctgcacgctggcactaccaagggcacaggctcaggcaagttgacct

SEQ ID NO: 37720 - DNA, 120 bp, Homo sapiens
ctacgaaataaagaccctaactcagcctgcatggctgtgatagaaatggctgtggaccctacaccctacccgcacccacggtcatcatcagaccggccaggcataggcacgcccactttt

SEQ ID NO: 37721 - DNA, 120 bp, Homo sapiens
gaccgttacatcctcattatcattgcatcagagcatttgaccaccggccatgcccagctggctcgcgagatcctgcagcagggcgtttctccttcctctgctccaagatggagtttgcca

SEQ ID NO: 37722 - DNA, 120 bp, Homo sapiens
cttcgtcttccagcagaggcccagagtgggaaaagaggtcacccccggtaccagcgcatgactgaactagactttgtagtgaaataatgctttttagctgccattccctaacagtcggca

SEQ ID NO: 37723 - DNA, 120 bp, Homo sapiens
aatcgcttgcattaaggagaaagagtatgtattggctcatttatttgcaaagttagaggattgcaaaatgctatgtgcccaatgcagacctggcacctgtggatgatggtggcatttaac

SEQ ID NO: 37724 - DNA, 120 bp, Homo sapiens
atccgggcagcgtagtggaacctgtgaggaggccaacagtcagggctgcctggccggggctccccccagcccagcaccaacccgggacaggtggagaaactgaggccccttttatgacct

SEQ ID NO: 37725 - DNA, 120 bp, Homo sapiens
cctcgactgggatacagggaggatcctaacagtgatgggaggtggcccaacttttcttagctcacccaggttatgcaaagctgaaggttccagggcttggactaagacctcaagtctcca

SEQ ID NO: 37726 - DNA, 120 bp, Homo sapiens
ttacgacatagaaaacatctaacagcagctgcacaacccacaatcttctccctctctcctctgggtcctggtttagaccaatggcaggagcagagctgggactcaaagctctgccccatc

SEQ ID NO: 37727 - DNA, 120 bp, Homo sapiens
tgccgggccaagtgaaagcagggagagaaagccagaggcaggaaacaagacaaatgcagaagtgtgaagaatgagaccctgatggcttcctggttcccatctgctgcagggccctgcttt

SEQ ID NO: 37728 - DNA, 120 bp, Homo sapiens
ccccgagcctaaatttccccaccaggaaaactggtgacaaggacctacatgatgctggctgattaggaggattcaaagtcacaggaaacagcatgttgccacatgggtgagatgcttaca

SEQ ID NO: 37729 - DNA, 120 bp, Homo sapiens
tgccgatctaagggacgcccccttctctctacaccagggtggggtgcctcaaattgaccccctctgcaaagagctcttaccagttcttctcggtgaggatcgtgtgtgacagctgtggcc

SEQ ID NO: 37730 - DNA, 120 bp, Homo sapiens
ggccgggccatggacatcacttggctccggagcttgctcaccaaggactggaaactggggtggccacgatacccaggcagcagggagaagagtgggctggaaccaggtcctggaaagttg

SEQ ID NO: 37731 - DNA, 120 bp, Homo sapiens
ctttctcccagttaacagcatcctgggcttcaaggagcacctgagagttcagccccggctgagctcttcctgtacttctatgactctgaaacacactcctaataaagggtccacacaccc

SEQ ID NO: 37732 - DNA, 120 bp, Homo sapiens
gaccgtgaaaaggaaggcagcaatctggagtgactgagggtgggcaggatggaagggaggtgaggacctcttctgcccagactaatcaggagtccctgatcccaggactcagttcaggag

SEQ ID NO: 37733 - DNA, 120 bp, Homo sapiens
aggcgtcaaaggggagggggtgggaaatgacttgcctgaggggcagagccaggagttgagccagtcctgactctcagtgttgtcctcttcctatagcccttggggcagccagggctcttc

SEQ ID NO: 37734 - DNA, 120 bp, Homo sapiens
caacgtaagtgtggggaaggttgtactctggaggcagtttgcggtcattattgatgagatggtctaggatagaagggctcaggatgggctgcagcaaggaagagaacagagtgtcactca

SEQ ID NO: 37735 - DNA, 120 bp, Homo sapiens
acacgctcaaggcaaatacattgtctatctcaggacaaaacaaggtcagaaacaaaggcaggcaatttctaattagaacagcaaaaggaagttaaagaaaaaaaactcaaagctgataca

SEQ ID NO: 37736 - DNA, 120 bp, Homo sapiens
gctcgcaagcacctcatgcccaaagagaagaaactgctttgtgctaatgaatttttaacgtttactcaaatgagtcatgtcccttaaaggctcattttgttgtcagttgtttcatacgct

SEQ ID NO: 37737 - DNA, 120 bp, Homo sapiens
caccggacttttttttcttaaaggaacattcaatcaaaaaactttaagagctaaattaaattagcttgatagtctactggcttcttactgcagtgaaattcttttagaaaggggctttca

SEQ ID NO: 37738 - DNA, 120 bp, Homo sapiens
gctcgcgttctcaaactccaaacattgagcagtgctctattctgtcttgtttaacttccgtcctcctcttcacaggtctctgacccagaccacagccggtttggtttgtctccaggtctc

SEQ ID NO: 37739 - DNA, 120 bp, Homo sapiens
cttcgggcaggcagggagtgggaacagacacggtggcaaatcacatgctatggtgggaggtgcatatgggcaacagtggaaggggagggcttctgagaggaggccacaccccagtggagt

SEQ ID NO: 37740 - DNA, 120 bp, Homo sapiens
aggcgttagccaggcaaaaacgcaaggcgagagcctattgtactgataatggtattaattgctaagggtatttagcacctaactcctgttgggtgctgtcattaggactttacttgcatc

SEQ ID NO: 37741 - DNA, 120 bp, Homo sapiens
catcgatgcactgaaacctcacaaaacccctatgaggcaggcagtattgtttttcccacttaaaactgaggaatgaaaataaataacttgacaaggtcacacaattcgttggtggtttca

SEQ ID NO: 37742 - DNA, 120 bp, Homo sapiens
aaacgggatatgcgaagtccagagaagagagagatcagtgtgtgtgtgctgggggtctggtggctcctccagaggcgaggataggcagtctgagggaggcaagccacaccctccgaatgc

SEQ ID NO: 37743 - DNA, 120 bp, Homo sapiens
agccgaggaaaactgccaggtaaacgcaggaccagtcagtgctaacgacagtgacgagcctgagcactaaccttgtgccaggtcctggccaagcactttgcctggattgttccactgaat

SEQ ID NO: 37744 - DNA, 120 bp, Homo sapiens
aggcgaatgagatgggggcaaaagtgacaagagactaagggccaagaaaagacacaatttgccccagggcagccagtatgtccatggcttgactggaagcacatggaatccacgcagggt

SEQ ID NO: 37745 - DNA, 120 bp, Homo sapiens
aggaagaggctcaatgcaggatgtggcagggtggggcaaaggcaggcggggctggcacctgtgtgtccaggaaaacaatccgttcttgggtaataaagaagtcgatgccactggtctggt

SEQ ID NO: 37746 - DNA, 120 bp, Homo sapiens
tgacgctcatccatggaggccagggtagtatcacctgctttacaaaaaaacagatccctgtatttttaggtaacttcaacatgtctctgttcttcaccaccccagtggctactatccatt

SEQ ID NO: 37747 - DNA, 120 bp, Homo sapiens
tttcgggacctgtttctcaagttctcccctccccaaaacctgctcctgtgcccttatgctttatcttcataatcacattccatccttactcaagaatgttgttcaggccagagaatcctc

SEQ ID NO: 37748 - DNA, 120 bp, Homo sapiens
gatcgtatcagctaccattctgtgatacttgctctatgccaggtgctcattaacttttgccttcttgatcttattttattctccaaaaatctacctggacaggggatacgggaaatgaag

SEQ ID NO: 37749 - DNA, 120 bp, Homo sapiens
cctcgtgggtcctggagagacagagagactgatggagaggcaggccaggaagagggagagtgagagtgggacacaccgaggtgcagacagaaaccggtgggcagaagtgggagacagggg

SEQ ID NO: 37750 - DNA, 120 bp, Homo sapiens
ttccgggccccgaggccagggggcaggagggcatttagacagagacattggatggacagccagacaatgtgcccaggacaggcagagagagagagagagaccaagcaaagagggagaagg

SEQ ID NO: 37751 - DNA, 120 bp, Homo sapiens
ccccgaactgagtcctttcctccagacagtgccagagctgatgagaaaaggcggccttgtctcccagccatcccccgcccccttagccacatagggtgctggccacaggaacccttcctc

SEQ ID NO: 37752 - DNA, 120 bp, Homo sapiens
tgccgcctactggaagaactttgtctttcctccactctcccttcaccaaacctggggctacctctccccttattggctcttggggggcttgagtgtctgatcagccaccctctggcctcc

SEQ ID NO: 37753 - DNA, 120 bp, Homo sapiens
ggccgtctaatggcaacatcttcaaagactgaaacactgaaacaaatattcccttccttttgcagagaaggaccccagcaactgtctcctgggagcacccaggagtcccagccaaagccc

SEQ ID NO: 37754 - DNA, 120 bp, Homo sapiens
aggcggtctggtcctggtgacactggactcgtcgggacctgccgatagcgcagtcatcctggtggaccccgatacaggcgtagcactcggcgccgctgagcgtcggcgggtcgggtgctg

SEQ ID NO: 37755 - DNA, 120 bp, Homo sapiens
gagcgtagatgcacactcaggcagtggtaccctggcacagtcgtgcgggctgcgcactgcgccagagcccgcgcctagcacgtctcgggggttgggatcctagcgcgccaagagcaggcg

SEQ ID NO: 37756 - DNA, 120 bp, Homo sapiens
cagcggaggccacgccttccccgaggctgccaggcctctcatcgtccctcccggagcccagccccgctctcccgcgcaccttggctcaggttggggagggcgtcatgagtcatgaggtgg

SEQ ID NO: 37757 - DNA, 120 bp, Homo sapiens
gtgggcgttgcatttgtcagttgtgcagccgcgcaccaccgagtagtctggcggcagcgcgtccgcgttcgattgcgtctggcccgcaggaggcccggtccagcagcccttccgcaccag

SEQ ID NO: 37758 - DNA, 120 bp, Homo sapiens
agacggcgtggcagggacggggcgtgtccccacggaggtgggtgcagttgtgaatgtgtgacgggctgacagggtgcgtggccgtatttgtaaatgtgatttgctttgaccaaatgctct

SEQ ID NO: 37759 - DNA, 120 bp, Homo sapiens
cttcgggcctgccacaattaaatgaccgcaagaaagaagtctatgctaagccccataatgaacgtttcaagcaagaaggatgagaattttagatctggaagtgtccgcgggacaggatct

SEQ ID NO: 37760 - DNA, 120 bp, Homo sapiens
acagactctagcctcccttttcattccgtttggttttgtgtggatgaaggcagaagtggccccagagggtgttttgctcttctttttcttttttaattaagtctgtgacgcgctagaaat

SEQ ID NO: 37761 - DNA, 120 bp, Homo sapiens
gagaaagaatgcctgtgcgttttgtgttttcactctgtgacattgtgaaattcattgtgtgagaacatggatggggttgtattccggattatggtttgtttctaagtgtgttactttgga

SEQ ID NO: 37762 - DNA, 120 bp, Homo sapiens
acttaagttaaccacacgggattattggttataaccacattatactgaacatttattagggcctcaggacacctctggcactctgcaaatccgtaatgacgatcgcttatctgagataaa

SEQ ID NO: 37763 - DNA, 120 bp, Homo sapiens
tttcgtttccctctcaggactttgagcaggtaaattcctggcctttcctcccccaggatgggttggggaaaaagaaacagcagctggggaggagatctgaacaggtacaaagggcggcct

SEQ ID NO: 37764 - DNA, 120 bp, Homo sapiens
ctgcgggtgggggccctccagaggccaaggcccagagaaaggagaccctagtcctttccgcctggggtgcaaggagccgggggagggtgggggtggccatcctggttccgcatcctccgt

SEQ ID NO: 37765 - DNA, 120 bp, Homo sapiens
tcccgacattggagggaggctgctgtgggagctgggactttcctgagagcagaagattctgggaaattagagacagctgcagggcggggctgcctcccagcctcccttcccttccctccc

SEQ ID NO: 37766 - DNA, 120 bp, Homo sapiens
ctccggaggcacgcctctccacccctccaccccaccagctcctcctcccctagtccatgccttccaccctcggaccctcagatcttttcccctgagcctctttcttctccctcagatctg

SEQ ID NO: 37767 - DNA, 120 bp, Homo sapiens
ctgcgtcccctcacttagtgcttctcagacttcctcagactgtgccctctccctcagatactctcccctcccctcagaccctcacctcctcactcagaccctcacttcctccttcagacc

SEQ ID NO: 37768 - DNA, 120 bp, Homo sapiens
caccgtctctcccagcccttcgaagctcccaccggacccatcacatcttctcccctctacagtcctgctaggttggaaccactgcaccagctgccctgggatgccaggagtgggacaggc

SEQ ID NO: 37769 - DNA, 120 bp, Homo sapiens
cctcgcccctccaaacctcagctttcctttctgtgcattgggatagtgctccacacccctctcctgtgtctgagggtccccaggggtggggttggatgggcagggaacacagcccccagc

SEQ ID NO: 37770 - DNA, 120 bp, Homo sapiens
aaccgaattcctcccctcttcccttgctgtggcccccacaacaccagcaggcaggggttgccattggtcccattttccagaagaacaaactgagtctcaaggcaggggatggcttgtctg

SEQ ID NO: 37771 - DNA, 120 bp, Homo sapiens
caccgggagcaaggggtggaggtggaattaacacaggtctgtgctcgggatgtttcgccatgaagggggataagggagatccagagagaggtcgaaaggaagggaaggggtgaggcctct

SEQ ID NO: 37772 - DNA, 120 bp, Homo sapiens
taacgatccactcgggtggggcccgagtccggccaaagtcccttcccggggccccaatacccactttcaaggtcccaggggacacagagacagcaacagagatggggagacagagacaga

SEQ ID NO: 37773 - DNA, 120 bp, Homo sapiens
gggcggggcaggagacaaccagagggaggtcaggcaagtttcgaagacagaaggagaccgggggagagaaccagagagacgccgcgtgccccctgggcaagtccggggtgcagcccccat

SEQ ID NO: 37774 - DNA, 120 bp, Homo sapiens
ccccgccccctgtgtccccaaagcctccctctccgcctcctgtgactcagtgacccggactcaaccccagcggctgccccgcccccagggaaatccgggaaagccccggaccttcggggc

SEQ ID NO: 37775 - DNA, 120 bp, Homo sapiens
ccccggggcggggagagggagaggaggggaggagacggggaagagtcccgcctccctcctccctccctcccatctccagcctgagtcatgcccccaacccgcctagcctgttccccaccc

SEQ ID NO: 37776 - DNA, 120 bp, Homo sapiens
cctcgaggtgggaggggaagtcggggggaagccaaactgctccccgctcctgcagcaccggcctcggtcgcgctgactctggcctggtgtccgtgtctcttgctatctctctttctctca

SEQ ID NO: 37777 - DNA, 120 bp, Homo sapiens
ctgcgcctgtctccatgtctctttctctctgtgcacctaggattttccgagcacccaccccggtgccccgcgggccccggctgggggcagggcccccaacgagtgcagagacacaatcag

SEQ ID NO: 37778 - DNA, 120 bp, Homo sapiens
gagcgctccccaccctcaccccacccccagcccctttagacccacagctgatgaggcacgtggagtggcagagatggaagaggggagggagaggaatcgttcctggccgcctgccgagtg

SEQ ID NO: 37779 - DNA, 120 bp, Homo sapiens
ccccgggtgcgtctcttcactcccactaaggaggaaacggctcagagaggggaagtgtttggccaaggtcacccagcgagtaagtgggaaccgagattccaaaccccgtcccagagatgc

SEQ ID NO: 37780 - DNA, 120 bp, Homo sapiens
gtgacagacacaaagagacaaaagagagagacagagacggaacagagcacacagagacaaacgcggggttgcggagagaaacacctactcagacaggagaaccagagagacagttacaga

SEQ ID NO: 37781 - DNA, 120 bp, Homo sapiens
caccgacttacaaattttcaacttagatgatgggtttatcggggtattaaaggcattttcgattcatgatgggtttatcggaacgcaatcccatggtaaatccaggagcacctgtatgtt

SEQ ID NO: 37782 - DNA, 120 bp, Homo sapiens
gagcggatcacgtctcttgtggttagatagttaatccagtagtctccaccatactttttctcgtcatatctccttactgccggcccagcggtcgcttaaacaggcaagaggctggctaag

SEQ ID NO: 37783 - DNA, 120 bp, Homo sapiens
caacgcttaggaccctaagttagataagcgactgaatactggcgaggctggtaccagagcttgctcgacaggacattcacagccgaaagttggaacaaacgtgtccacgtccaaaaggcc

SEQ ID NO: 37784 - DNA, 120 bp, Homo sapiens
gcccggatgctccaggcaactttcagcgcggctcgaggcggcttccgggagtcggcgactcggaggcccggacgtcgggcgatcagccagtccggaccccaaggccggagaaagctcggc

SEQ ID NO: 37785 - DNA, 120 bp, Homo sapiens
ggccgcggcgccccgaaaagagaccccattcattctgcccgctccagttttccgccgcgcggcccacgaggcggcggctccggagggcgcgcaaggggccggaagggccaccgctccttc

SEQ ID NO: 37786 - DNA, 120 bp, Homo sapiens
tcccgccgcgcgcccctcccccgccaccgccgcgccggcccgcctgggcctccccggtcgccctcccaccgcctcaaccaccctgcgccccgatcgcgcccaacccccggcggggggctc

SEQ ID NO: 37787 - DNA, 120 bp, Homo sapiens
tctcggtgccgaagatggaggccagatactccgccatttcccacccgccgccgccgctgccgtcgacactgctgccgacgccgccgaccctgccgacgccctcgggagacgtcacccgga

SEQ ID NO: 37788 - DNA, 120 bp, Homo sapiens
ggacgcgacgacgctcttccccgccccgacgtggcagcgctacccagtcaggcgaggtgctgcctgcgcgtgggcgggacgcatgcgcgtagggagcacgtagtgcgcgtgggaggctcc

SEQ ID NO: 37789 - DNA, 120 bp, Homo sapiens
ctccgccttttcggtcctgggaacccgcgccccctgccggtgccctccccgcccggccctagctctctcgccttctcgcccgcccggcgctggccctgctggatcctgcgcgccggggac

SEQ ID NO: 37790 - DNA, 120 bp, Homo sapiens
gaccgaacccggggccgaggggcttctccacagagccgcctggggctcggtggggggcgctcagctcgaccccagctaagggagcactaggaagtgcgggcgtccccttccctgcaccct

SEQ ID NO: 37791 - DNA, 120 bp, Homo sapiens
ttgcggggcgggaaccgtcgacctagaagaaaaaaaaagctgaggcaaacttgatataagtagagaggttatttgggccaagtttgaagattgcaacccgggagcatagcttcaagttgc

SEQ ID NO: 37792 - DNA, 120 bp, Homo sapiens
gtacgttgttctttatatcataattccaggaaaggaagttcatgggtgaaggcagcgggtccggagcaatagtgcctttaaacaattgccaggcatgggtggggaccgctgaagccgcat

SEQ ID NO: 37793 - DNA, 120 bp, Homo sapiens
ctccgggccggattaacctcgcacgcctcacatagctcggacgctctgtgttgtttttctcttctcacacccctctccgctttaccctccctcagcgcttgccaggtgcgacctccccgg

SEQ ID NO: 37794 - DNA, 120 bp, Homo sapiens
ttccgttggaagggttctattcctctcctgcgttttaaccccatcaagcagccattttcatctggtttcccacattcatcaactcacctgcgatttacctaatttccaacgcaactatca

SEQ ID NO: 37795 - DNA, 120 bp, Homo sapiens
gctcggctagagctgaatgctgagctctagtgtttgggcggatttgcgtgttagaattgcatttctcttggcaacagagcatcttcctacctgggaaagatgagcaaactggaaacctgt

SEQ ID NO: 37796 - DNA, 120 bp, Homo sapiens
acacgttgcaagagaaaagaagcaggttgggaacagtcgactgtgtacagctcactcctcagcaaatcagcactttacataagagaagcggatgttgaaccttctatctgtagccgtctg

SEQ ID NO: 37797 - DNA, 120 bp, Homo sapiens
acacggtctgggaacaaagactgctggagagttggaagctggcaagaggctctcagctgtgaagtacctggggtgggggagaagtggtcggagaaagcagaggtaaggtctgtgcgtggg

SEQ ID NO: 37798 - DNA, 120 bp, Homo sapiens
cagcgcctcttccaccatagaagcaactgtccagggcaattgtttgatggaatttttgctcctgacaggctgcctcacccattatcttcttgttcacatggaattagtgatgctaagaac

SEQ ID NO: 37799 - DNA, 120 bp, Homo sapiens
gaacgatgcatagccaatcagcaccttctgttattttaatgcaaattcttgctaacaacttagggactgcctcttccttttccttaaaaccccactgtgactgctgctaatgggaacata

SEQ ID NO: 37800 - DNA, 120 bp, Homo sapiens
aaacgactgttgtttactcgacctcactggggctggcaggggtctctggtaaggccagtcttgggatctgaatcctcccagcttagttgaagattgagacttacacactaataatttgat

SEQ ID NO: 37801 - DNA, 120 bp, Homo sapiens
attcgaaatttggtcaaggagaaagtgtcatctttaaaactggccatattctgaaacttggttcaactgacaaatctaaacattcttcttcttcttcttttttttttttttttttttttt

SEQ ID NO: 37802 - DNA, 120 bp, Homo sapiens
gtacgatcccatatttgtagaaaaccattatgtgtattctttttttctaaaaaaaaaatgctgtaaggataagaactaaaatcttaacagtgattatttccgcatggcaggattatcagt

SEQ ID NO: 37803 - DNA, 120 bp, Homo sapiens
aactgttcatggccctaggaccccagaattccatgcttcgaactgtgccccccggaaatagcaggtgatgtgtgcaaaggggtttctggcagggtggttaaaagaagggagatggctggg

SEQ ID NO: 37804 - DNA, 120 bp, Homo sapiens
aaacttgttaagaacacacattcctggcttcatctcagtgcctggtacacagtaagaattcaaaaccaaccaccatcattattggggtgttatagaagcccccgaatggagaacacaacc

SEQ ID NO: 37805 - DNA, 120 bp, Homo sapiens
tatttctctggaggatactgactctttaaatggctgtaaaaatcattgagcgcctactcgataccaagacattctcttctaagaagagacttctttctttaccatatactgtctaccttt

SEQ ID NO: 37806 - DNA, 120 bp, Homo sapiens
ttcacgctttttgaaaagatagctaaaattcagtgtgttcctcttattataaaggattgggctaatagttaagcatttcaaaacatttcagtttcgttaatcagaagctgcagtgggttt

SEQ ID NO: 37807 - DNA, 120 bp, Homo sapiens
caccaggtggcagcccctccgaggaccagagggtgagatgggaggcccctatccaaggggtcttaccctaaagggtttgggagaaacgcagtctcttggccagagccaacctattcctac

SEQ ID NO: 37808 - DNA, 120 bp, Homo sapiens
gaaagagcctgctgacaggtagtgcccatcccggctttgattcattggccgtctgggcaggagctggaccgatcagctaggaattacaaaaatgcttcgcacatattttcctctcgctgg

SEQ ID NO: 37809 - DNA, 120 bp, Homo sapiens
gaagagcagcctggcggaattcctgccgttcccaagcttgagctggccgtgtgaccttggacagctcactttggctgtagcctgtccaaaacgggggggccttgtcagagattcactctc

SEQ ID NO: 37810 - DNA, 120 bp, Homo sapiens
aagatgctggatgttgggccttggcagataagggttaactggagagcctccccaagataaggggctcacagttcgccaccactcctgttccctaagaagataagggttctggctgggcgc

SEQ ID NO: 37811 - DNA, 120 bp, Homo sapiens
ttcaaggtccagctctaacggtacccgctccatgaaccctgcttggctccctccccaagacggaatcatcttgccctacagtcccctccatcacgcgctcagccctccccttggacaccc

SEQ ID NO: 37812 - DNA, 120 bp, Homo sapiens
cctccattttatagaggagtgagaacttcatctaggtgagagtgaagtgcaggcttttgaacaagaagtgagatcgtggctgaggaggtgagcaactagccaagggaagcaaagatttcc

SEQ ID NO: 37813 - DNA, 120 bp, Homo sapiens
cttcgatgatggttataatcgtatggcagagccccaactcaactggagccctgggacccagaagctagggtctcactccctgcttttccacaaggcaccattagggcatcaccccaggcc

SEQ ID NO: 37814 - DNA, 120 bp, Homo sapiens
cctcggcagccacgacgcagggatcctgcctctcattggttgggggcttaggggctctgggctgccctcttgaagagggggttcagcccagcgaggcaccccctatgctgcaccccacca

SEQ ID NO: 37815 - DNA, 120 bp, Homo sapiens
ctgcgtccacatgccttggaagagatggtgacatactcaaagtccttgaagccgcatattaaaccacctagagcaccatcttcaaacatttagggtctgagaagataggggaagtaagca

SEQ ID NO: 37816 - DNA, 120 bp, Homo sapiens
cagcgctccctcacctccactgccctcaggccttctctgcctctttcccatcagtcagctgcttctgggcatggtcctggcagagacttggcctccttccagttcaagctccctcttaga

SEQ ID NO: 37817 - DNA, 120 bp, Homo sapiens
ccacgccactgagtctctgggacactgggtcagttgtctagtctggcacaattggcaggaatcccaagaaacagtgtgagtgaggggacagtcgtgttgagtgcgtggcctgataacagg

SEQ ID NO: 37818 - DNA, 120 bp, Homo sapiens
gcacgcgataccatcatagatcacatggggaaactgaggccccaggagtgatctgctggcacatgcagtgacaagaggagaggcccatctcagccttgcagcaaggttgccagaaatcga

SEQ ID NO: 37819 - DNA, 120 bp, Homo sapiens
tctcgcccccatcccgtaaagcctctctgcatcacctgcttcccacagcagcagcctgggcctccaaagggcacattcagatttgagggatttggggagtttgtgggcaagggcagacta

SEQ ID NO: 37820 - DNA, 120 bp, Homo sapiens
atgcaaagaagccccctgccattctccatgaatggagctgaatgccctagccccccattcttccacgtgggagtatcctcttgagagtcctgctggctgttggtcaaggcaggttaaaag

SEQ ID NO: 37821 - DNA, 120 bp, Homo sapiens
ccacgtgcctggccagcaaagtcatttaattcttggggacccctagcaggaacaagaaacaggaacactttccagcctagccctttgttaaattaggaagtgttactctggctattagaa

SEQ ID NO: 37822 - DNA, 120 bp, Homo sapiens
cctcgggtagcgtgtgactggagaaatgagggctggagccgtggaccatccgagggcccctcccctgctgggtccaggcaaagggccggccctctccagcctcgattggggcgcgatagc

SEQ ID NO: 37823 - DNA, 120 bp, Homo sapiens
tagcgcccttagtgtcgtgtcgggttccaggccacgctcgggcattttaagaggctgaggtgcgccttccgctgcccgcctgcgtcccgccacggagagctcgcctttatctagccctct

SEQ ID NO: 37824 - DNA, 120 bp, Homo sapiens
gggcgagagaagaaggctaatcccagcctgggacaaggctggctgaggcgtgccggatcctccggggaccgatcggtggcctcgcgcggctctcatcgctctccgagcagtgctccaggg

SEQ ID NO: 37825 - DNA, 120 bp, Homo sapiens
gggcggagggagcctcctcgggcggtggggaggaggctggaggaatgaggacgcagcacggcgcgcccttgcagcgctcaggctgacgggcgggcgggcggagcgggcgcacggctcctc

SEQ ID NO: 37826 - DNA, 120 bp, Homo sapiens
aggaatgaggacgcagcacggcgcgcccttgcagcgctcaggctgacgggcgggcgggcggagcgggcgcacggctcctctaggtccggctgctctctgagctcgcgggctggacgctgt

SEQ ID NO: 37827 - DNA, 120 bp, Homo sapiens
ggacgggtcctggggcatgggatctcttgggctttaaaatttcccttccccgttgtaaatttcttccagcccagatcttgagcagctttcagggctgagggctcagagctatgcctcagc

SEQ ID NO: 37828 - DNA, 120 bp, Homo sapiens
tcccgtctctggtctctgttcagaggcctggccccgagcaacctagccactggaattcagcccagacagaggccagccatcttttagcaggggaaggcaagcttcagccttcactggggc

SEQ ID NO: 37829 - DNA, 120 bp, Homo sapiens
aagcgagaagtagagccctttccctgcctccttccagtctccgtaggcacctgagctgccatgatcagggcttcggggcgagggtcacttcagtgcacctggctgttataagtgagctgg

SEQ ID NO: 37830 - DNA, 120 bp, Homo sapiens
acccgacgggggccaaagtgggagcagggcttgggagacttcagtgaaaagatctcaaggtggctagtgaaatggagagaggggcctgagtctggatgcatggggttgagctggagctgg

SEQ ID NO: 37831 - DNA, 120 bp, Homo sapiens
gcccggccctgcccactgcagattcattctcctggcatctggttttcctataaagtgccagtcagctcaaaccagcagcagcatctgatcaaatagatgagcaatatgaataaaaatgaa

SEQ ID NO: 37832 - DNA, 120 bp, Homo sapiens
tgacgtgtgtgttgagtaatgattcctgacgcatatcttcagaaatagtagttgctcacactgggtggtgtgtcaaggcggaaggaggccacagacttggggaatggaaccccacctgga

SEQ ID NO: 37833 - DNA, 120 bp, Homo sapiens
cagcgccctggggctgcctgccgcatcctgacctggcatggccatcagcctttcggccataggtggggctggttagaggacaagtgtctttcctggtcaggcccactgggtgcatccctc

SEQ ID NO: 37834 - DNA, 120 bp, Homo sapiens
caccgcggatatttttacattagaagcagcatagtttgtacgggacagggcccctggaatgtgactcttagttcattaaccatttggtaactgctcatctgcctggcaaaatcccttccc

SEQ ID NO: 37835 - DNA, 120 bp, Homo sapiens
tggcgtttccatagcgccattatccctttgccactgtttttaggtctctatttttggtcaatgtttttcctttatacaaacatccttttaatatcattgagatccaaaaaaaaaaaatgt

SEQ ID NO: 37836 - DNA, 120 bp, Homo sapiens
ccacgttatcgcaggctttgtgtttattcgttggaaggctgtggaatgccttttccttctgttagacatttaggttcttcccagatcactgtagccaactgctgcctgagcatctttggc

SEQ ID NO: 37837 - DNA, 120 bp, Homo sapiens
ttccgggacacattgccaagaatgcaatcgctgagtcaaagggtgtgaatgcttccctctagcagccccatcacccttggcaagaacgttctggttcatgatgcttggggcgggtgtgga

SEQ ID NO: 37838 - DNA, 120 bp, Homo sapiens
ttccgtccccagatctacctcacggggtcttcgcaggcattaactgaggcagcgcctcacccacagcctggcacccggaaaggtgtggtacacatcagccgttagagcctttctaaggct

SEQ ID NO: 37839 - DNA, 120 bp, Homo sapiens
taccgtgaggcccagagcaacagcttacggagccagtggcccagaccctggcccagcccgtgtggcctccagacgtctgggggccgcagttgggcttctgagtgcagacacgctgtggcc

SEQ ID NO: 37840 - DNA, 120 bp, Homo sapiens
ggccgcctggctggccactgtcttccttctgggctgctggggcctccatgagaggggcaggcggtcatttgaataacaagttattgtcatttgggggctgcagttgtgatgggaggctcc

SEQ ID NO: 37841 - DNA, 120 bp, Homo sapiens
tgccgtgggcaccctcctcagctccccttggcttgggccccatgcagctggctggcctgaccctgccatggacaccacgtgcactcggaacagtgactcagccatgtccacccccgtgta

SEQ ID NO: 37842 - DNA, 120 bp, Homo sapiens
tgccgtgggaagaaacgttctctcacagtatgcattatttttcaaaaaaagtcttatatcttgggttacagattttcttcatctaaaaatagtttttagctgattatttctaaacaaggc

SEQ ID NO: 37843 - DNA, 120 bp, Homo sapiens
gtgcgccaccccccagagacgcccacagccccataaccccagatgcaggctgggctggcaggaaaggggccctgggcagctgcgtgagagagaggtaagagggggcgtgggagctggcag

SEQ ID NO: 37844 - DNA, 120 bp, Homo sapiens
cagcgtgtctgcacacagaaggcattctatcagtgagaatggctgtgttcctgcagggagatcggtgaaggggagcctcaactgtgacattgggccttttggcagactttgtttttgttt

SEQ ID NO: 37845 - DNA, 120 bp, Homo sapiens
tgccgtccccctcagggaacctggagagatcagcttggctcttggctttcagccatgagagagaaacagggtatggggttcacacgattcctgagcatctctggtgggcccagcagcctc

SEQ ID NO: 37846 - DNA, 120 bp, Homo sapiens
tcccgacccgttccccacaggccacctgtccctggttgcgtcttcctgccctggtggcagttcccccaacacccatgccccagctcctaaggactgggctatgaggggctgggacaggcc

SEQ ID NO: 37847 - DNA, 120 bp, Homo sapiens
ttgcgtggcatgccagacattctgcatgcacctcccctgcccctactctgcaggcttacgcatagggagaccaaggctgaggggctcaggatcccagctgaaaaggatacaagcccatac

SEQ ID NO: 37848 - DNA, 120 bp, Homo sapiens
ggacgcagtatctctcacaatccccgtagccctgtagcctctatgcctggctcagagcccagcacatgggagcctcagcaaatgagagagagagaggaggggtggggagaatattgtgaa

SEQ ID NO: 37849 - DNA, 120 bp, Homo sapiens
aatcgcttagtgtctggcaaaattccctagtgggtaattttttttgactctgataaaagctagcctagcagatccgtgcttgaattactgttttgggtaactgtgaattctcctgccatt

SEQ ID NO: 37850 - DNA, 120 bp, Homo sapiens
ccccgtaggactattaaatgactttggtttttagaatgagtcttgaaccataacgtgcctgcccacaggtgctcggccaggcatgaggtggggacattctccctcatagcagcgtcctcc

SEQ ID NO: 37851 - DNA, 120 bp, Homo sapiens
gttcgtacatattacaagctcaggcttggagtgttagcatccataaagtgaaaaagctgcgggagcaggttccgtctgcaggccagggcagcagagcaaggctggggcgtgctctcccct

SEQ ID NO: 37852 - DNA, 120 bp, Homo sapiens
aggcggggcccaggcaagacagactgcacctgactcgacccccattcctgaacttggaaggctcctcatagttggtcactcatgctgggcctaggacatggtccttctgaccacatgacc

SEQ ID NO: 37853 - DNA, 120 bp, Homo sapiens
ccccgcaccctcctgtgggagctgtaaccacataggtgatatgggatgtcagcggcaaaaggacctttaggggaaagagccagtgaggtgggatggggtgaaaggccacaggtgcagaca

SEQ ID NO: 37854 - DNA, 120 bp, Homo sapiens
gtgcgcactgggagccacaggaggggaggttggagtgaagaggaggccagtcacaagggaccttgtgctgacagtgttctgcttccacttgaaatgagacaaaggactcaatgccaagtg

SEQ ID NO: 37855 - DNA, 120 bp, Homo sapiens
ccacgtgcattttagcaagacccctctgctgtttggagaatgcgctatccgcgaggcaggggcaagtgctcggagacccttcgggggccccttgggcagagaaagtagagctggcgcccg

SEQ ID NO: 37856 - DNA, 120 bp, Homo sapiens
agccgctagagaatgggggccttgctgtctgacgccctgcttggcccacacatggttccgcaggatgcaggagggtctttcccaggagtgggttttgtgtagccagtgagtgggcagagc

SEQ ID NO: 37857 - DNA, 120 bp, Homo sapiens
gctcgaggtgcccagtgcaggcagaaagcagggctgggctggccaacagagggtagatgcttaccaggcctgatgggagagatgccgcactcttggtccctgggtttaccaaggaaggta

SEQ ID NO: 37858 - DNA, 120 bp, Homo sapiens
tgccgcagggctggctgggcagtatggggtgcctgcgacatcctgatggcaaggacatgggaaaacctggggaggaagggcacccggcacagccagcactcgatggagtcggctcggggg

SEQ ID NO: 37859 - DNA, 120 bp, Homo sapiens
acccgcatcagaaggggccccactgctggacatgctgaggcttctctgaggcccctcttggctcacggcccaggagatcacgtggggctccttaggccaacccaggcaggggtgagaggc

SEQ ID NO: 37860 - DNA, 120 bp, Homo sapiens
gcccggagctgccctcccttgtccctccggggcctgtggggcaggtttctgcccagctgaccaccgtcctgctctgacagcttgctcatccagggcctggggagatgggtaaaaatagat

SEQ ID NO: 37861 - DNA, 120 bp, Homo sapiens
ctacgtgcctggcacgtggaaacaaagcagatcattccagatatagtaagagttacaagtgctatgggagggagagagactgagaggtgctatttcatatggaatggtcagggaagcccc

SEQ ID NO: 37862 - DNA, 120 bp, Homo sapiens
ggccggagccaagtgacatgatgaacagtggtgtggagaagtggggcccagccacatgaagaaagacaccacaggggggctctgctgctagggtgggatcactggccttcttccaagctt

SEQ ID NO: 37863 - DNA, 120 bp, Homo sapiens
ccccggccccagagcctcagaagttggctaaagcccacagggttgtttgtttgttttgtaaaaaatatgttttccactgaatcttcagttttttgtttcagcagctggcatccacccaag

SEQ ID NO: 37864 - DNA, 120 bp, Homo sapiens
ttccgtccctctgtcattgtcctctggatcacagctcgtggctgctaagagggtcatttcctgtggccgagaggcagggctgagaaggtgaagtgtgggggccaggccttcccacggatg

SEQ ID NO: 37865 - DNA, 120 bp, Homo sapiens
ggtcggggcacatgatttgaaaacccatcaaattcaggccacatgacctgagaatgaggtgagactgagctgtgtctggaagacagaaaagcccttctgccactatagaccagagcaggg

SEQ ID NO: 37866 - DNA, 120 bp, Homo sapiens
taatctggtttctcaaactggctctctgtccccagaaagaggaagaagggtgccagggcagtgtccagcccatatccatctaactcctcacacactgatatggtttggctgtgtccccgc

SEQ ID NO: 37867 - DNA, 120 bp, Homo sapiens
agacggggtctccctatgttgcccaagctggtatgttcactcttcatctcaaaacatagccaggaagctctagccaggagcacttctctttccaacaccctgaaaaacagctcataaagc

SEQ ID NO: 37868 - DNA, 120 bp, Homo sapiens
gggcgtgccacaagatacatcccaggggtatgggaactgggagcctcactgcgtgacctcaggcaaggccctcccctctctgggcctccttttccttggctgtataatgagggattgatc

SEQ ID NO: 37869 - DNA, 120 bp, Homo sapiens
ttacgagaagagagagttccagttaaagggagctaattaaacagctttgacttggggcgggaaagaggctgtcgaaagcctcctcgctgggcatgatgtcaccacaattgtgcgtttctc

SEQ ID NO: 37870 - DNA, 120 bp, Homo sapiens
gcacgtcggagccagagccggtgatgcaagcacagcctggtaaacaggccccagacaggcaggccctgtgaggagccgtggtgcagaggcctggcaggggcccagctagtgtttaactcc

SEQ ID NO: 37871 - DNA, 120 bp, Homo sapiens
ggccgctaaggtttggtcaaggagccttctccacccgtccctgcttctctctgaggcacagtccctgttagtggcaagccgtcaatctggagccacagtagacctgcattcccacccacc

SEQ ID NO: 37872 - DNA, 120 bp, Homo sapiens
gctcgctcaggagccttgggtaggtgactctctggtcccgagtctcagttttcttatctgtacaatgggaagaggaatcaggccctcaatctcatacctacagctccaagttcagaaaat

SEQ ID NO: 37873 - DNA, 120 bp, Homo sapiens
tgactgagggtgtgcaatctgttcatttcacttagagtcaatactcacacttctagctacagaaatattcgtatgtttcattggagatggatggatccagaccccactggattacctttt

SEQ ID NO: 37874 - DNA, 120 bp, Homo sapiens
ctgcgctgggaggctgggccaggatttaggggtccattttgatgggcagcactggggcaagatggggctcttgcctctgtcactgagagtgttccaggcccttgagggcactttggaagg

SEQ ID NO: 37875 - DNA, 120 bp, Homo sapiens
cttcggaagccggagatgacgaagattttgattacatccttctctgccctctaagtctttggcttcctccttgctcagtgacaaatccttggccctctccaatcttctcagtttgcctga

SEQ ID NO: 37876 - DNA, 120 bp, Homo sapiens
ctgggtgcctggacacctggcttcaggaggtctggacagcagagctggctccaagaatcggaagacacagtgtaccttcctatacctgggggaatgacagtggtggtggcagcaagaact

SEQ ID NO: 37877 - DNA, 120 bp, Homo sapiens
tggcggccaagctggcagggctggaaccagagaccccctaccctgggtttggtgagttttccagcaaaccaccctagggcagagggcagcttccagccaggagccacattataggatggg

SEQ ID NO: 37878 - DNA, 120 bp, Homo sapiens
ggacgctcctaggttagagagggaaagtaaggcacagagcctaagtgcctgtggtttctggaagccccagcatgcctgattcatgtctgtcccctgcagaattctctgagctggtgacag

SEQ ID NO: 37879 - DNA, 120 bp, Homo sapiens
aaccgacggagctaggggccagcgagatggcggacgaggccttagctgggctggatgagggagcccttcggaagctggtaagtggccccatcacccactgtggggacaggaaagccaagc

SEQ ID NO: 37880 - DNA, 120 bp, Homo sapiens
actcgcccgtatgcagccacaggtgtggggaggctggatatgcctctccagagcaatagctcgggcaatgcccacccctggaagctggcccagtgataatggtagcagcaatgattaata

SEQ ID NO: 37881 - DNA, 120 bp, Homo sapiens
ctgcgactcaagagagttaaaatcacctgctcaaggacacccatctaagaaggagctgtgccaaaatcccaaccccatagtgggccacgggggaccagagtcctgggaaagtcaaggctg

SEQ ID NO: 37882 - DNA, 120 bp, Homo sapiens
ggacgaggccataagagagagacaggttttgtgggcccttatggattctgtggcttctcatctcatttttctactcttgagtctcagttcctctacctgtaaaatgaagggagggaggga

SEQ ID NO: 37883 - DNA, 120 bp, Homo sapiens
ggacggccgtggccaggcctccacaggccgggtgctgctgcccacaggcaaccagagggcaggtaggcgccccccactgcctccccaatggggatgagtgcctgcaaccgcacttctgca

SEQ ID NO: 37884 - DNA, 120 bp, Homo sapiens
ctgcggccaggactcagggtgtctccaaagggtgtgctgggagcgagggcattatcaaccttgtctggcactgccctcactccacctgatcctcctgacagccacctttctccccactca

SEQ ID NO: 37885 - DNA, 120 bp, Homo sapiens
ctgcgggcgcccccgaccctactcagcaccagtagtgggggcaagagcaccatcacccgtgtcaacagccctgggaccctggctcggctgggcagtgtcactcatgtcaccagcttcagc

SEQ ID NO: 37886 - DNA, 120 bp, Homo sapiens
agccgaggaggctgcagcatcaaggtgagcccctcctcaccccaccagcctcaccatccgtcagcctcacatacactgcttcagggtgtagggctagcagggttcctctgctcctcccct

SEQ ID NO: 37887 - DNA, 120 bp, Homo sapiens
aaccgaggcccagagagggaaggtggctgctcacagaccacagccagtcggtggcagagctaaggccagaccctagcatatcagtccctaagtgtgtcggaagcttactctgtactggcg

SEQ ID NO: 37888 - DNA, 120 bp, Homo sapiens
gttcgaaattggttggttcattcctggtgaacagatggggaaactgaggctcagagagggtggtaagggcttgctcccctcttcctgtggcagccccagtgcccctgcgcccacccacac

SEQ ID NO: 37889 - DNA, 120 bp, Homo sapiens
ccccgaggtatagagcagctcatctgctcatccaagatcagcctggcccattaggagattggagattagtgattagcatctgcgtcaacctccctgtgggggttgggcagaagctctgag

SEQ ID NO: 37890 - DNA, 120 bp, Homo sapiens
gggcgccaatcaggtgaggcagcagcctagcaggtgccttgggaactgaatacgcagcacccttccattattcattcccaagcccaggatccactagccgggagctcagccgggaaaggg

SEQ ID NO: 37891 - DNA, 120 bp, Homo sapiens
aagcgggccacccggctgcccaggtaatgccctctgtgctaaaccagggactgaatgggactttggctgaggtgagatggctagaccagctttgggccttctcaggggagacagggagag

SEQ ID NO: 37892 - DNA, 120 bp, Homo sapiens
acccgctgaggcccttgaggtggatgggaggtgccacagtgagacctgggtctgacaccaccaacttgcctcagtttacccatctggaaccaaaggggacaggtgatgtacccataatgt

SEQ ID NO: 37893 - DNA, 120 bp, Homo sapiens
ggacgtgagcaccatgggcaggccagagggcatttatgtaagaccaagacactttttatagcagatcactcaaagtcctgcctccctgtgcctccatttcccccatctgttccagctgtc

SEQ ID NO: 37894 - DNA, 120 bp, Homo sapiens
gtccggccggtaggcagtggcggctgtggctggggccacaagcgccgcgagaagcagcagcagcgccagcggaggcaacaggaggctcatcgggacccggccgcagatgatgcgcaagct

SEQ ID NO: 37895 - DNA, 120 bp, Homo sapiens
aggcgaacctccgagtcgctgcgccacgtctgggcccccaggctggccccgcccccgcccccgcccccactcccgctagaggcccagtcccgctggagaccacgcccccagcgctcggtc

SEQ ID NO: 37896 - DNA, 120 bp, Homo sapiens
ctccgccccaggactccccgccgttacctcccgctagctcagggcgaggtcctggctcctccctggcgtttgggccgtcactttcccaggtccgagagtgtcgacgctccttttgtcgac

SEQ ID NO: 37897 - DNA, 120 bp, Homo sapiens
gaccgaggatgtggacgctcccccaggatgcggccaggcagcgccacctcacgccggcagagggtgccggcgagacgctgagggacactggagtttctgagccgaacctgcgactttaag

SEQ ID NO: 37898 - DNA, 120 bp, Homo sapiens
cctcgctttggagcgtgggagatgaggagtgaggttcggtggagggggtgcggcttctgggagccactgagacctaccagcgtgtcttcttaccatccacagctactgctgagcagactt

SEQ ID NO: 37899 - DNA, 120 bp, Homo sapiens
gatttacttttttttttaatgtggctatccaattcaattaaaaatcttgtctttttcattgctactctgccgcgttacctctgttatatataaataggcaaccacggccgggcgtggtgg

SEQ ID NO: 37900 - DNA, 120 bp, Homo sapiens
ctacggcagaaaggtgaaggtagacagacagcctccttcctgctgccagttgggacctgggccaggcagatgggtacactctcccctccccactccatggctgttccagcctcagcagcc

SEQ ID NO: 37901 - DNA, 120 bp, Homo sapiens
cttcggcctcttccaggctgggaagtgggagcctgtgcctttaaattctcagcaggttgaaatggctgatgacatcactggttcccgggagcggtagagctggagccggagccaagggag

SEQ ID NO: 37902 - DNA, 120 bp, Homo sapiens
tgccgggggctgcagacatggagggccagagcagcaggggcagcaggaggccagggacccgggctggcctgggttccctgcccatgccccagggtgttgcccaaactggggcaccctcca

SEQ ID NO: 37903 - DNA, 120 bp, Homo sapiens
ccccgctttcctgatccctggttccacacaccccccccacatacactgcaggctccctggtgctcctgactgaggggctggtactttcctctgctcagcgagcaggggctaggtgaagag

SEQ ID NO: 37904 - DNA, 120 bp, Homo sapiens
gcccggagacagatgaagttagccatctccaggagcccttgggagagtcctggactgggtatcagaggacccagctgtgctccacctttgctgtgtgaccttggccaagttgcttttcct

SEQ ID NO: 37905 - DNA, 120 bp, Homo sapiens
ctctctgagccaatgcaaaatgagggggcttgtcgctgaagactaaaactgtgacatctgggatggctaagttgttagtactggaggcggtgtgatagttggggggaagccggcacacag

SEQ ID NO: 37906 - DNA, 120 bp, Homo sapiens
acacgtatgtatatatcaggtgctcctgaggcacctagccctgtgctgagtaaggaacctggaagctgggtctgcgcttgacaagacgcacaagaacagatcactgagttaccatttgtt

SEQ ID NO: 37907 - DNA, 120 bp, Homo sapiens
ggacgttggcttgggttgggaagctttgcctctgactaggtctgtgaccatgggcaagtgacctaactactctgagcctttatttaacatcccaagggatgctaatgatgatacagtagt

SEQ ID NO: 37908 - DNA, 120 bp, Homo sapiens
cagcgtagacaggctcaggcatgccagggttcctggcagaaagcttctgtgtgaataagcatgtgctcacagaaatgagacctctgctgggatcatgcctgttatttatcacccaaattc

SEQ ID NO: 37909 - DNA, 120 bp, Homo sapiens
tctcgtgttctctttcttgctcaattcctgtgaggtgggccagaccaagtagaccaaaggccagctctgggaaggtaatatattgaagatactgggtcagtcaacttcagccgccaggct

SEQ ID NO: 37910 - DNA, 120 bp, Homo sapiens
atccgcgttagtcccagcaccacatgtgttgccctggacatctcaaagttaggactgttttttaaaactaggtgtgaacttatttcttaaaatgatcagctgtgttccagttggactaaa

SEQ ID NO: 37911 - DNA, 120 bp, Homo sapiens
cctcgtgtaaccggagaatcgataacaaatcaaatatttactgagtgcctgtgatgtctgtggcactgggcaggaccaagttttacctcttataaattttaacaggtgttagagccagga

SEQ ID NO: 37912 - DNA, 120 bp, Homo sapiens
aaacggagttgtccagggtcactcaactagtggtagagccagaaccaaggtaagacttctgcagtgttctttccagtattccaggctgcttaagacgtacagggtctggcacatggtaag

SEQ ID NO: 37913 - DNA, 120 bp, Homo sapiens
atacgtgtggtagaggcaaggattgggaggtggaagattcataggaagtggaaggtacagctgagaatgtgggtgcaaccggactagagggtttaatgccaggctgaggattttggaagt

SEQ ID NO: 37914 - DNA, 120 bp, Homo sapiens
caccgtaggtttagagaaaggaagactcatgatgtgggcacagggccaccaatctggaggtgggtatagtgggccctgagatgaggtcttagtggtagcaatgaagaaggcaccaaccaa

SEQ ID NO: 37915 - DNA, 120 bp, Homo sapiens
acataggcaggccagggtgacttggatggtcctggatatgtgatggagcagggtagggtccaaaatgaccacaagatttcaaaactaaataaaaatccgtcatgatcaaggggctgtatt

SEQ ID NO: 37916 - DNA, 120 bp, Homo sapiens
aagcgtcatttgctatatataaaagtcatcaaattaggcactgtgggggatacggagttggcatactagcctggcctcttaattaattcattaattagcttatttatttttgagataggt

SEQ ID NO: 37917 - DNA, 120 bp, Homo sapiens
tatcgtttagatctttacctggatggctcagagaaatatagaagtaattcctcaccctgaaaaataggttaggtccctgttttatgttttcatagacctttcctttgaggctttttttaa

SEQ ID NO: 37918 - DNA, 120 bp, Homo sapiens
caccgtggctgcagttactgtaaatggcaagacggaatcagttccggacattgggttgttttagaaaattgcctgcaagtgtcagggtgataagttaaagctttgtcttttgccctcaga

SEQ ID NO: 37919 - DNA, 120 bp, Homo sapiens
ctccggagaggagggcaagagaggaagaatgagttcagctactctagccaccaaactgattatgaattgccctgaaatctgaaaaatttcaattccaatcgtaagtttgttttgtttcat

SEQ ID NO: 37920 - DNA, 120 bp, Homo sapiens
gagcgcctgcagcctcctgctcacattcctagacaccgactcactgagcccgtcgccgctggaacagcagagctgtgtgaaatgtcaagaggagttatgctcataggctccctggcctca

SEQ ID NO: 37921 - DNA, 120 bp, Homo sapiens
tcccgtatgttatttccccacttccagcccacctcacctcctctgtggcccttgtgtgtcccctcggctaggatcctgacctcctgctcaagagtttaaactcaacttgagacccaagga

SEQ ID NO: 37922 - DNA, 120 bp, Homo sapiens
tgtcgcattcaaacccagacagtctggctctgggcccaggctgagctttggtatagcatggtagaacgttgtctataatgtctagtctgggttcaaatcctggcttcacttctcacattt

SEQ ID NO: 37923 - DNA, 120 bp, Homo sapiens
cttcgtggtatagatagatagatatggctgagctctgcacaaacaccaagagctgttcttcactattagaggtagtaaacagagtggttgagctctgtggttctagaacagaggccggca

SEQ ID NO: 37924 - DNA, 120 bp, Homo sapiens
aacagagtggttgagctctgtggttctagaacagaggccggcaagctatggcccattgcctattttaatacggcctgtgattgattgattttttttttctttttgagacagagtttcact

SEQ ID NO: 37925 - DNA, 120 bp, Homo sapiens
ggctttagtcctggctccccaggacatgctcctggtcttgcaaacactttcatactcgtacctgcagtccagggcagctaatcacctgtggattcttggggagtgggcggtttgtggcca

SEQ ID NO: 37926 - DNA, 120 bp, Homo sapiens
ctgaaataaagtctctgtgtgcagcccggcagtgcctcagctccgcctgcagtgaaggtgaggattctcctgcttcacgtggtggtcggctgctgttaactcggttaactcgagtgagat

SEQ ID NO: 37927 - DNA, 120 bp, Homo sapiens
tgtggtcccggctggcgggagagacctgggctctgagactctctgggagccacgtgcacgggggcgtctcctgcaggagaccccaccctcctgacggatgaggaggctccacccacgcag

SEQ ID NO: 37928 - DNA, 120 bp, Homo sapiens
ctgactgtggtgggcggaagtacctgagccttctgcgtctggcagggccgtggcctggctcctctgaagggcacttgctcctgattccagacaactctaaaatgcactgtttcgtgggag

SEQ ID NO: 37929 - DNA, 120 bp, Homo sapiens
gcccgaggccggcgccccgggccggccaatgaggctccagttcctcctgtcttcgatgctgcacggcctggcctccagcgagaggcagataggacgtgggagaaaggaggagaaggggct

SEQ ID NO: 37930 - DNA, 120 bp, Homo sapiens
ccccgcacagggctggggctgcaggccggcggtgtgtgcggtgcagagccctcccaggggctctaggcttccctgcctttgggatgaagctaacagatgctgaagttgatcctgctccat

SEQ ID NO: 37931 - DNA, 120 bp, Homo sapiens
gagggcagggtgacacgggcggcatagcagagtggcatggacgggcagggtgacacgggcggcagggcagggtggcacgggtgggcagggtggcacgggcgggcaggatggcacaagcag

SEQ ID NO: 37932 - DNA, 120 bp, Homo sapiens
accacctggatggagccctctccagcccccagtggagtgggaaacattaagtccttctacaaggagagtcaaccggggtaaacacctcacagggcacacacctttgacttgggcactgca

SEQ ID NO: 37933 - DNA, 120 bp, Homo sapiens
gccgtcctaacgggcacgaggtgatgcctcacgtctgcacttgtgtctcctgagcagtggttggtcgtgtggagcatcttgtcatgtgccgcttggccattggtttatcttctctgtaca

SEQ ID NO: 37934 - DNA, 120 bp, Homo sapiens
tctcaaggtgcgtccctggcagccggagatgcacatgagatattggcctggccgggcaatttgcacggccttccagggagggcattagcatataaatagcagatgcaatgacgaccatca

SEQ ID NO: 37935 - DNA, 120 bp, Homo sapiens
tcctttgcctttctggtggatccctgcctgggctttgcctctgcagccccccgccccacaggttcacacctcgggtcttctccaccgctgccacacgccagagcctgtagcggggcctca

SEQ ID NO: 37936 - DNA, 120 bp, Homo sapiens
cgaagtggctgctaagtggctaatgggaaggcagcatctgcggcgtggatccactggacaaacagatgactcctgtccggggcaggatggagcaggcaggtgtgaggtttcactgcagta

SEQ ID NO: 37937 - DNA, 120 bp, Homo sapiens
cccgcgtcctggggaggaggcttgggccgcagcccagcacccagaagtgcaacgcgcacgggtggggccaggctcgagtcagccggtgacgcagcctctgtgtgaccagggcggatggcc

SEQ ID NO: 37938 - DNA, 120 bp, Homo sapiens
ctcaggcagggcctgatcctgctgaggccatggtggccgcttggttggtgtttctgttccctgagtagctcacgccctcgggtgacagagcagccgtgaactgccgactgacggatacac

SEQ ID NO: 37939 - DNA, 120 bp, Homo sapiens
ccgcccaggccccgctcgctcagggcgacgcgcctcagccgcggcggaacaaaaccgcggccgccgccccgccccctccggccgccctcattggccgcccgcgccccgccgccgccgcga

SEQ ID NO: 37940 - DNA, 120 bp, Homo sapiens
agcccaggccttccttggggtgtgctccagtagcaggtgcgcgtgccacctgtgccgtgggttggaggggtggaacgtgtacgtcctggctgcccccgagctctggggaccccgaactcc

SEQ ID NO: 37941 - DNA, 120 bp, Homo sapiens
agccgagcacgaggaatcggggacggcggggggctctccaccctcgcagggcctgggaacggctcaggggtggccgtggggtgcggccagggcggatctgtcctgggctgggctcagggg

SEQ ID NO: 37942 - DNA, 120 bp, Homo sapiens
cggcccctgcggccccgactgggagacccaagcccagaggcgcgcccggccccaccgccccctccgcccgcccgcctccggggctccccgcgcggctcggagattatgcaaatccccggc

SEQ ID NO: 37943 - DNA, 120 bp, Homo sapiens
cccgaagcccccaggctatccacctgcctgccctttcctccctatccagccatgtgcacatgggggcctcaccaaagcagctgaagctgcaagaacatcgagcctacaaggccacagcgg

SEQ ID NO: 37944 - DNA, 120 bp, Homo sapiens
ttgctcagctgcaagctgggtgggtgcagtctgagcccaggcctggcgggcactccatgtgcccccaccccaggacctgctggtcctcaccctgccttcaaagcctccccagccccagcc

SEQ ID NO: 37945 - DNA, 120 bp, Homo sapiens
caacgggacccctggcccctggcgccccagcagagttggggactgagccgctcctgtgtaggagaggggaggggttgaggagcccaaacagcccatcttgagcacagaaggagcgatgct

SEQ ID NO: 37946 - DNA, 120 bp, Homo sapiens
ggcggtggtgcgggcgtccgaatgggcgttttctagatacggggcgcggactagaggctcgctgggcccggagaccggcggactggagtcggggaaccggaggtggggagggggctcccg

SEQ ID NO: 37947 - DNA, 120 bp, Homo sapiens
gtgggtcccatctggtgtgccttgcggggatggggttgcctgcagtgccagggtcctggggggagagggcttgtgtggcaggggccggggaccctattggggcacagaggatggggtggg

SEQ ID NO: 37948 - DNA, 120 bp, Homo sapiens
caaagagtggtgcccaatctgcaggcaaggaaaccagggatgctggaacggggaggcctggtgggaggacccttgcagcccagggttggaggttgggggtgtgcatcagggggcagagtt

SEQ ID NO: 37949 - DNA, 120 bp, Homo sapiens
aggctgccgctctgtgactaccccagtgcctggaagctcagcctccccaccgccaacaggagtgagcgccctgccgccccccaccccaggaactgtgtaggcaagaggccaaagcgtgct

SEQ ID NO: 37950 - DNA, 120 bp, Homo sapiens
gacccagctggcaaagctccctacatcttcgtccaggcagccatgggctgaacgatggtggctccatgccaaagggacagggagggaggccacagcatagggcaacgctaggtcgagggg

SEQ ID NO: 37951 - DNA, 120 bp, Homo sapiens
ctgattcaagggtccccagggcccctgcatttcaccccaggactgtggggaatccagatcctttgctgcaccccagacacaaggtcctcacgctccctctggtggagagcccacagaaaa

SEQ ID NO: 37952 - DNA, 120 bp, Homo sapiens
aaggaccctgaggctgaatgtggatgtccccaggaggccacctctcaaagagacttctggggggagtgcgacgcagaattacagcacccagttattccagcaaaaaacataggcgtgaac

SEQ ID NO: 37953 - DNA, 120 bp, Homo sapiens
ctgagatgggcaaaggactagtgggaccttgtcactgccactcaagtgggggcgtgggaagcagtgcgtggaaccttccattgagagaaagatgcagtcacacacacgagtgtcaacacg

SEQ ID NO: 37954 - DNA, 120 bp, Homo sapiens
agaaagcctggagggggcctgcctgacagctgcaccagccggggtggaccaaaggccgcagatggttcagctggctgacccttcccaactgaagctccgcccagttgggccccgcccagg

SEQ ID NO: 37955 - DNA, 120 bp, Homo sapiens
tcctgtttatgtttttagttctgtcatcgtattttggttttcacgagccctctctttttctccagccattgcttgttccttggacgctgtatctcctcttctcttgcatggcagtgcctg

SEQ ID NO: 37956 - DNA, 120 bp, Homo sapiens
gctcagctttgtttcaatgatgtaagtggcagtatttatcaaattaatatctttgtttttcaggacttgaaaatactggaaatctgtccggatccaaattattttgcaagccagatgagt

SEQ ID NO: 37957 - DNA, 120 bp, Homo sapiens
gaagtggggctgaattgctgtcttctagataagcattctgttatcagcagttgtaggagaatattggtgggaatttatcttaacatcttgcctgacagttgcacgttgcaaatttctctg

SEQ ID NO: 37958 - DNA, 120 bp, Homo sapiens
catcgatgaggctgaatgctgtgtgcactgcacccccccaaccccgccccagcccagatgtgtgctgctggaccctctttgatacttaaggctcacataagcctccgggaatgtattcac

SEQ ID NO: 37959 - DNA, 120 bp, Homo sapiens
tcgatgaggctgaatgctgtgtgcactgcacccccccaaccccgccccagcccagatgtgtgctgctggaccctctttgatacttaaggctcacataagcctccgggaatgtattcacga

SEQ ID NO: 37960 - DNA, 120 bp, Homo sapiens
ctgaggggaactgcacagccctgagtggtgatggggaactctgggtgccccgacacactaagcatcatgctgggacctagagaccctcagacgcccaccgcacatgcccagttctgggca

SEQ ID NO: 37961 - DNA, 120 bp, Homo sapiens
ggtcctctgggtcctcggctgggcaggcggctgaaggcctggtgagaccccttcagaacccacttgaggccaggtgggacggggagttctgggtcccagtggggcgagtccctcattcac

SEQ ID NO: 37962 - DNA, 120 bp, Homo sapiens
tgaagtggtcacaggtcaccctaagcaggcccctgcctggccttccccagagaccatcattccttacccgcaataccttgtgggctggaccctcccccacctggagcggctgcctgggaa

SEQ ID NO: 37963 - DNA, 120 bp, Homo sapiens
cggggagcgcccctcggaggctttgccgcagcgccgattctcctccaaacttctcccctggctcccgcggcgcggggaaggagggcacggccgggccccgcagacccgcagggctccggc

SEQ ID NO: 37964 - DNA, 120 bp, Homo sapiens
cacgtggtgcagacaggatggctcaccataaacaagggaaagaaacggacacacatgccacccatggccgaccagagaaacccagtgaagcctaaggccaccactggcccccgaggagat

SEQ ID NO: 37965 - DNA, 120 bp, Homo sapiens
tgggttaggaggcatcaagccggcctctgctgggttagatggcaccaagccggccttcacaggacgttacctttacagagctctgtgagcaagaggaactcagcctgccccgtgtctgac

SEQ ID NO: 37966 - DNA, 120 bp, Homo sapiens
tttcggatttcattatttcatttcatattttaatttatcccctagtatctataagaatataaaatcatttactgccaagatacaatgggaaaaattaacagtaacttagaagggcacttg

SEQ ID NO: 37967 - DNA, 120 bp, Homo sapiens
taacgaattcctagatcctaactacctggtttatatattcgtaccttctctctgtcttctgttttccactattcttgagtcaatcattatttgtgatgtcatggagaaaaaatgaggtaa

SEQ ID NO: 37968 - DNA, 120 bp, Homo sapiens
aatcggcagaactgaaatagataagcacaagtttacctctcttctctctgtttttaccatcgtctatagcaggggtgtccaatctttttgattctgtgggccacattggaagaagaattg

SEQ ID NO: 37969 - DNA, 120 bp, Homo sapiens
ttacgagtttatgttgggccacattcaaagccgtcctgggccacatgtgattggtgggcctacagtattataaaaggacataggagtcttatgtcttatttattctctacaaatttaaaa

SEQ ID NO: 37970 - DNA, 120 bp, Homo sapiens
tcacgtacaaccaagatgtcactttataatgctgcaaagacatagaggaaggtgtagaaacacacacttccagaaaaaaatactaagaggcaaattactgattaacatttaacattctaa

SEQ ID NO: 37971 - DNA, 120 bp, Homo sapiens
tgccgagtcctgcttgaattactatttcgttgaagattattaatcaccagctgccatcacacagtggcaggattccaaggcagcactctgaggactcctctgttcattcctctgtcgcag

SEQ ID NO: 37972 - DNA, 120 bp, Homo sapiens
tttcgtcagacttcaacatactgtgaaatggtgacatgtcaaaggttgcattattggttgataatgcagctctgtaaagtgtgtgagctcgggtcccagcgtcccctgccaacacacaca

SEQ ID NO: 37973 - DNA, 120 bp, Homo sapiens
tgctttcttatcacttcttagattgttttttttaattttatttgtaagagtaagggaaatttggtagtttataagcctgagttcaaacttccatgatttctcagttgtcaaacgtatttt

SEQ ID NO: 37974 - DNA, 120 bp, Homo sapiens
caacggaaaatgtcccaatcaagattaaattacagcagcctgctcatctactcttcaaatactctgcagccctcattccaaattccacatcagcttttaaccagtagggtaagtacatat

SEQ ID NO: 37975 - DNA, 120 bp, Homo sapiens
tgtcgggaagtatagctgaaaattccgtgccacaggattttagagtggaggtttctaatagttttgctattgttaggtcaccatggaaggaacatcattgaagtcagtcagtgtagttat

SEQ ID NO: 37976 - DNA, 120 bp, Homo sapiens
catcgcactctcgatgttatttaactaagatctatgacctcaattagagtgaaaaggattcatctctcagctccacaggcttagcaaaagtctcagccattcagttcaaaggattaaata

SEQ ID NO: 37977 - DNA, 120 bp, Homo sapiens
acacgcctcaaggtgcttcccattaataagatgaataaaattaaacagttacataacgtgtctatccataaatcatttaaattcaactaaagtacctgactagcagtgttttacaataac

SEQ ID NO: 37978 - DNA, 120 bp, Homo sapiens
cttcgttacagtcttttcaatagcagaatcatttccaggccaccagacacagtgaatgattcctgaatgtgctacatgtggtgtggccaagatgacagtactgccatctggaataataac

SEQ ID NO: 37979 - DNA, 120 bp, Homo sapiens
tcacggaacataaattcagcagtttatggaaatattctgattgaaaatagcattgctttattgcctaactaacccgtctacctcccctcctggatccccaaaatttatttgatacagcca

SEQ ID NO: 37980 - DNA, 120 bp, Homo sapiens
tatagaagctaaaggtataaaatctgtaggagattgttgtcttaactcgagtgaggtttgaggttccctgacaggatagattggtcccctttgtatataatccctggaattatttctaca

SEQ ID NO: 37981 - DNA, 120 bp, Homo sapiens
aataaaagttcctgaaatcctggtatctcctcttattcttttatttttaattaaagctgcagagagtcattgactgaaatgtcttctatcctcgttgcttttttaaaaaaatttacctca

SEQ ID NO: 37982 - DNA, 120 bp, Homo sapiens
attcgactattaaatttgtaagcaattgcctctcatttgagactggatagtcctgtcctagatgaagctacaggtatgacaaaagtactatcaaattgaactgagcacaataaatattga

SEQ ID NO: 37983 - DNA, 120 bp, Homo sapiens
aggcgttgcagcattttaattgtattttctcctgggaaagaattatctcctgctttaagctgctgggggaaagtattgttaagctttttaaatgctgaatataaaggtcataccactgag

SEQ ID NO: 37984 - DNA, 120 bp, Homo sapiens
gatcggagcccaaaattattaaaactcattaataggcacatataaaaataaggaatcgttcaattctgcagctgtagttttattctacattgtaaataccttgggggagaaacgcattac

SEQ ID NO: 37985 - DNA, 120 bp, Homo sapiens
gttcggtaacttgtctgagatcgctgaagaagctattgatggggaagaatttagaatttaattctgaaaggagtatctttccatggttttacatttttcctgacttaatgaatctggaat

SEQ ID NO: 37986 - DNA, 120 bp, Homo sapiens
tttcgttaaaactgtacatgctgccacaactaacaaagagcaagagagaatgtggtcagcaatttctttgcctttttttcccgagttttcttttgcttgtttgtccagtttttttttcta

SEQ ID NO: 37987 - DNA, 120 bp, Homo sapiens
ggatgagggctgtgacaccaacatgtgtcaccaatgggatgagggcgggtcccgctccgtcactgggaagatgctgtggtcagggctgtagccaggtccgaccacagggccggccactgt

SEQ ID NO: 37988 - DNA, 120 bp, Homo sapiens
gtcgcacaggaagccggccagcccccagatgaagtcggagcagaggtggcagaaggtgggcttggtgagcgtcaccttccggaagctgtgtcccggcgcggcagcggggcccggggctct

SEQ ID NO: 37989 - DNA, 120 bp, Homo sapiens
acacagggccacggagtggagggagccccagttcatgggggctctgcgggaagggcaaatgaggcagggtggacactgccaggtgagatcaggacgggattggagttggagcgacttccc

SEQ ID NO: 37990 - DNA, 120 bp, Homo sapiens
gcacgtatggtgtcccttttcacgaatattcattagagtctccttgtgtacaattcagagggaaattcttcgttctattcccttgcttcacattagttgaaagggaaacaatccaatgct

SEQ ID NO: 37991 - DNA, 120 bp, Homo sapiens
atgcgttccgccttgcctgtctttgtccatccctacagtggtgggactccaaggcaaaattagcttgaattcaccagtgatagtagtgcttagagagaaatcttctcgtgaaaataaagc

SEQ ID NO: 37992 - DNA, 120 bp, Homo sapiens
tgacggcagtgatggaaagtctgtgaggaagtgatcctccaggtctgtgcaggcaggggacaacctgtggatgttggcagggggtctcttcagcagagagtaggatccagctgcggggtc

SEQ ID NO: 37993 - DNA, 120 bp, Homo sapiens
taccggaagtgaaatttgaaaactgtaaccaaaagaaaccaagccatcaaaaagtgtaatatccaatggggactgatctaaggaagtgagaggccagtaatccaaaaggaaaaggaggcc

SEQ ID NO: 37994 - DNA, 120 bp, Homo sapiens
gagcgaagaacagcccaggaggcatgccgaacctcatctccagcatggtcctggccactgcgagactagctgggtttccacctttcctggcccagttgtggtcaggtggcccagcttcag

SEQ ID NO: 37995 - DNA, 120 bp, Homo sapiens
acacgacaggactcaagtgtccaacactagcatttcaactccgtctcaacttgataccaatccttgcactttcaggccaggagaaaatagattttgagctcaaataatgttaatgctcca

SEQ ID NO: 37996 - DNA, 120 bp, Homo sapiens
tcacgtaatctgccatcatcacaaatcacgttttcaaggaatattcactgtctaaggaaatgcacgtcacgtaagggtatgaagaaaagcaggctgacatgccagaatgtgctctagatt

SEQ ID NO: 37997 - DNA, 120 bp, Homo sapiens
acaactttattataaacctctcctttgcttttaaaaatggatcaccacgtccatttctatggtccaactttgtcccttaatttaaaattttttcttggattaagtttgatgccttgaaac

SEQ ID NO: 37998 - DNA, 120 bp, Homo sapiens
ggaggggtggaaatgcagggagaaggagaggcagctgacagagtatgtggcccaggagggacagaggccaggggcccaggggcctgactcctgacagcgttccagttacaccaggatccc

SEQ ID NO: 37999 - DNA, 120 bp, Homo sapiens
tgagtggtagactctgagctcggccaggaccacggaccagggacatgtggccttctgcactgggggcagtggggcctcccatgccaagtggggcaggggctgctcctccctgtactaaaa

SEQ ID NO: 38000 - DNA, 120 bp, Homo sapiens
tcccctttccatggaagttttcatggcttctggcacaccctgtcagcattctcttcccaggaaggtactgggaagcactgccacgtgtactcctctcattccttttcactactaccaaat

SEQ ID NO: 38001 - DNA, 120 bp, Homo sapiens
ctacttttgcagtacttgggaggagtcaccagtaaaaacctctttaaggggactgcttcccagagtgaggaaaataaaaagactagcctggggagcaacgggctgttttcccatgttgca

SEQ ID NO: 38002 - DNA, 120 bp, Homo sapiens
ttctgacatggtgattaggtgttctggcaagcttttatcttccctgcactgtgaacccgagagattccacctggccccctttctggacttcctattattttcactgtatttgttaacaga

SEQ ID NO: 38003 - DNA, 120 bp, Homo sapiens
tctatcttttcttgcttctgaggtattacatccattgctgctttcatgaatgtttttttaaagacaatgggtataccagtcttatgcacgttccacattggaaggaacttgcgaagtcta

SEQ ID NO: 38004 - DNA, 120 bp, Homo sapiens
aggctacctgccttctctccttgcacctctggaccgcatgcaggacggttcctcccagctttctcctccaccaactcccatgtgagttcacctccctttgcacaatgggccagtgtgccc

SEQ ID NO: 38005 - DNA, 120 bp, Homo sapiens
tccaaggcaaatgttatgcttttcataatacaaggctgctggtgatctctgtgccttctctagaccaaacgtcactcttccctccaacaccaggaggtcactcctggactctggtcttgc

SEQ ID NO: 38006 - DNA, 120 bp, Homo sapiens
aaactcataggcaggaacccaagggtctggtgcctcccgggtcctccatccacctagggcactcgggtcagaggaacagtctcggcttgagctttacattccccatgtcctgggcccttt

SEQ ID NO: 38007 - DNA, 120 bp, Homo sapiens
gacgaccgtgctctggggtgagtggggactcaggctccttcccagagacacgccccacctccggtgcgcggcagcttggggcgcaggtgagcccctcctttgggaacgaatggagggccc

SEQ ID NO: 38008 - DNA, 120 bp, Homo sapiens
tccccgcaggcaggtaccacgacccccggcactccctcttggcctcctggatcagtagcacctcatcctgagaggagagaggatcctcacttcctgccacagccttccctcgccccggga

SEQ ID NO: 38009 - DNA, 120 bp, Homo sapiens
ccagcctcgggcagctggtgctctcatttcatcatcgggtccaggctctcctgccgcagcccctgccccttctctgagccccacggcagaactccgggtcccctctgccttctctgcacc

SEQ ID NO: 38010 - DNA, 120 bp, Homo sapiens
tgggcccagcctgctttggtacattgtgggtgcatccctgcatgtggccttggcagcatctgctcccggcccttaaccatcagcaggagtcaggagggtggggcccaggcagctggtgca

SEQ ID NO: 38011 - DNA, 120 bp, Homo sapiens
cggagagcgccagcagccccggccccgggccccccctggcccgcagccccgccatgctgcccgcgatctctccctggggccggcggccgcggcccccgccccaccgctcccgcggctggg

SEQ ID NO: 38012 - DNA, 120 bp, Homo sapiens
tcataggcacggggcaaggggagcctggctgtcagctgcctgggcttctagtcttgtgctttttgcacaccagtccagggaacgaagaccactggctttaagatgcttccccagctgtcc

SEQ ID NO: 38013 - DNA, 120 bp, Homo sapiens
ttctccctcttcttcaggggcatcttcctggataccattgtccccaagtatgaggtgaacggggtgaaacctcccattggccaaaggacacggctcagcaagggggacattgcccaagcc

SEQ ID NO: 38014 - DNA, 120 bp, Homo sapiens
aaacaacttcaacgtggaggtgcatttataattcagtctgcatttattctgtaaaaaggtggctgttttataaattcttttaatttatgttcaatatatataaaaagtgcatctgttttg

SEQ ID NO: 38015 - DNA, 120 bp, Homo sapiens
aaaaaaaacacccacacaattatggaacacccagagcgtgctggacactgtaaaaacactttacgaggctcacctcgtttaacccctcgatatcctgacaaagtaggggtgatgatgact

SEQ ID NO: 38016 - DNA, 120 bp, Homo sapiens
tgaaagcatgcagtttcctgaaagcttccacgtttcactctagacatgaggaggagctctagacactaaggggaccttgtgggaaatgccaggtggggcggggacccacggctgatactc

SEQ ID NO: 38017 - DNA, 120 bp, Homo sapiens
atggcacaggaccaagtacgtgggtcactgacaaggtcccgccccggcatgaaccctgctcaggtgtcctgactggggcaggtggccaccctgactttggcccggcagggtgggtgtgca

SEQ ID NO: 38018 - DNA, 120 bp, Homo sapiens
gccgtcaccatgttcagaaggtcctggtcttgctcacagaggggattggagagtaagtccaaggatatcttcacggcagattttgacatggctgtgggaagccaaagctcggtgaacctt

SEQ ID NO: 38019 - DNA, 120 bp, Homo sapiens
tttattcacacactatagttgaatcccctgaggtccagggttgtggctatataggtccttgggcctgacggtaaggtaaggtgctgcatatgagtattctctaacctctaagaaagcccc

SEQ ID NO: 38020 - DNA, 120 bp, Homo sapiens
ggagggaagaagggaagggatgggccaggagaggggatcttctcttttttggggggcgggagagggccccagggggtaatcctcttgggtgcctcagctggtgcggtatgaggctgggtc

SEQ ID NO: 38021 - DNA, 120 bp, Homo sapiens
acccagagcgtcaccaccctccatgacactgggttaagagacgagatttcccaaggcccaggccatctgaggcttgaaaagtacaggctgtccaggccctttgttctaggtcgtgcgatt

SEQ ID NO: 38022 - DNA, 120 bp, Homo sapiens
acattgtgtgtgaaatatttcatcataagctgtgaagcctgcaaagaaactcctggtgttctctgtagcctgatttcatctctactaaacgctattttgaaaatgattttgaagctggtg

SEQ ID NO: 38023 - DNA, 120 bp, Homo sapiens
tgccagaaaaaaaaatcacaatttaaatcggcaaaaaaatgggtgaaacaatatacccttcattaatttaaagaaaagaaatcgcatgtgttctggggagctgtgcaaattttattaacc

SEQ ID NO: 38024 - DNA, 120 bp, Homo sapiens
taacgtcatcaaatcttcatctgagtgatcaaaggttgttcatcagagcacacttcatacaaagctccatgccagggagtgagggattgtcaatatccagggaatcctatgcaggaaaca

SEQ ID NO: 38025 - DNA, 120 bp, Homo sapiens
gccccaaacccacagctcccactcaggacacgcgcctcgaggtgtggcccggcgccgggcggtgctgcccggagagcgcgcagcccccagccggccgcgccagcgctgcgcccactctgc

SEQ ID NO: 38026 - DNA, 120 bp, Homo sapiens
ttgaagctccaccagacaggttttttttgttttgttttgttttgtttttgtttctgtttttgttttttaacgtatgtatagacaaaaatcactctattggctgctagttatctacaatgt

SEQ ID NO: 38027 - DNA, 120 bp, Homo sapiens
aaccacagcgctggggtctgacacaactgcaaactagccgtgactttgcgtaggcctcagtttgctcatctgtaagataaagagggtgattttgacatacattaagcataacgtgctagg

SEQ ID NO: 38028 - DNA, 120 bp, Homo sapiens
caccctcttctgaccctgctgctgttgtccccatccgccttcacccctctgctcttccgcatcaccccatccaccttacagggaccagggggcccacgtaaccaggacccagagggtgga

SEQ ID NO: 38029 - DNA, 120 bp, Homo sapiens
ttacgatcatggtttatgatgggaggttataggattgtatttcagggactgtcttttaagaattgtactgcactaaaaaaaaaaaaaaaagaattgtactgcactagtctccagaacaaa

SEQ ID NO: 38030 - DNA, 120 bp, Homo sapiens
gcccgtcccaggaactgtatgtatttacctgttagtggtgatgggcttagataagttgcctataaaatgattcgaaacatataagaaagcatttctgggctggcacggtggctcactcct

SEQ ID NO: 38031 - DNA, 120 bp, Homo sapiens
ttccggaattatatacaagctagtaaatatatttcagctactattttccaggcctgttaggtaattggagatatagggataaattagatgggtctctgccccaaagagcttgaagtctaa

SEQ ID NO: 38032 - DNA, 120 bp, Homo sapiens
ctacggagatgagcagaagtagacaaatttgagagagtgtttgaagatagaattgatgggacttagtaggtgcatccaatatagggataagggaaaagagatattggagatgactccaag

SEQ ID NO: 38033 - DNA, 120 bp, Homo sapiens
tggcgtatccaaatgggtgacggagggtgccacttgcttagataacaggagaggtaaagtaagcttatggggaaagttgatgagttaagtttgaaagatcaagtttgaggtacctatgag

SEQ ID NO: 38034 - DNA, 120 bp, Homo sapiens
gagcgttcagaagaggaaagggcctaggactgagccttgaggaactttaacaattaaaggcttggtatagaaggatgggcctgcaaagggagagaaaaagaatggctagagaggtaggag

SEQ ID NO: 38035 - DNA, 120 bp, Homo sapiens
cttcgtgggctgttgaaaaagtatccattggattcagtgacaacggagccatgggtgaccttagaaaatagattgggtagagtaataggggtaaaagccgtattgatatgcacctcgata

SEQ ID NO: 38036 - DNA, 120 bp, Homo sapiens
acacgggtaagcctcctaatatgtttgcttgtaaaggggcagggaatagttagaaggaagttaaagggtggcttttttcccttaattaatagactttatttttagaacagttttaggttt

SEQ ID NO: 38037 - DNA, 120 bp, Homo sapiens
gctcggtggggcagcctcgccaggagaccaggccctgccccgcccccaccccacttaacccgttgccgatgggggaacctatgggcaccgtaaaagccgcggggtcgacgtggcggtcgg

SEQ ID NO: 38038 - DNA, 120 bp, Homo sapiens
tatcggcaaaacgctgatccacgtgaggactcgcagttttcgacctactgggagccagcacctgaagcaaaggattcgagtcctgatgtccggagactcattaaaatattttcctaagcg

SEQ ID NO: 38039 - DNA, 120 bp, Homo sapiens
gcgcgcacacactcgcaggtcctcctccttggtcgtcggtaacccaccacccaaccgaattaaaattcgcaaattgattcccacgcgttggtattaatgggttgttcctcttaaattgtt

SEQ ID NO: 38040 - DNA, 120 bp, Homo sapiens
gtacgtgttgttttatagatgcgtatttacttaaagaaatcaactgcatgtattaacatattaaagagagaataaagcatcggggccggtgtaatgtactgttcagccttactttgggtg

SEQ ID NO: 38041 - DNA, 120 bp, Homo sapiens
tctcgaagataggaaaatcttatttgtttaataataagtcactcatgaatatgcaaatggcatcggtgcagtacctcacttctgtcactattaatgagttgcaaattaatgtgacaacaa

SEQ ID NO: 38042 - DNA, 120 bp, Homo sapiens
acacgtacctcctcacgtagtgttttcctggagcctccactattgtttggtttcagggacctgctttgtcaggaaccccttaaaattcctgctccagaccagaggaagaaaggctgctcc

SEQ ID NO: 38043 - DNA, 120 bp, Homo sapiens
ccccgagcttaaagattccccaaagcctttttgacctctgttgctttggacagggttgaggacgtaaatagcgaattagccctcacaggcctgatcacaggtattaagacagcaccctat

SEQ ID NO: 38044 - DNA, 120 bp, Homo sapiens
ttacgaggtgactttgctgatgggagatttaagagcagatcagctcattttcctgccgacctacttcccagaggttacagactgaagtctggttgtcttccatttgagccttcattcttt

SEQ ID NO: 38045 - DNA, 120 bp, Homo sapiens
catcgatgatgctgaagagagtgtttctaattcagttaagtttggaaacatcgctgagaaaaaataaatgttgagctgtccagaactgtgaacgaatagttcaggtgcctggatagcatt

SEQ ID NO: 38046 - DNA, 120 bp, Homo sapiens
gcacgtattcgatatctaacctggttaatggttacatggttttatacatatgtaaaaattcatcaggctgagcatttaagatctgtgcacttcactatgtctaatctatgactatgtaaa

SEQ ID NO: 38047 - DNA, 120 bp, Homo sapiens
ccacgtgggcctctccacagggtggcttgggcttccttacagcatggtggctgtgtaccaagcatcccaagagagaggaaatgaaagctgtcagttacttaaggcctgagcctggaagca

SEQ ID NO: 38048 - DNA, 120 bp, Homo sapiens
atccggaattagtcctaacatgcctgatcacatgcactaagacaacaccctatgcaccctatgcaccctatggcagtaccatatctgccaagttcttcttttcttcctttcttttttttt

SEQ ID NO: 38049 - DNA, 120 bp, Homo sapiens
cctcgtatgacaatcaaaacccaaaggttccccaccctggacagttccctctgactcagggcctaaaatggatctgtgtctccttttttttttcctctgcaggatctgaaccttgaggct

SEQ ID NO: 38050 - DNA, 120 bp, Homo sapiens
gagcggattgatgagtaggagggcagatcattaaacagccaacagcagtatgaggtgtttaatgaagacagacttaagaccaggggattcaagggtgtataatagaggatcctaaactag

SEQ ID NO: 38051 - DNA, 120 bp, Homo sapiens
atccgggcttcccagaagcctttatagaggaagagacgtttgtactgaaacagaaggatgaaacctcccgtttgctttacttttcaaaaagaatcagcaaatccttttggctatatgttc

SEQ ID NO: 38052 - DNA, 120 bp, Homo sapiens
tctcgcccacactactccccttgttcttccaacatgccaggcaccctcttgcctctggtctgtaccctgaccaacccctttcccagagattcttttcggtcttctactcttccagctgcc

SEQ ID NO: 38053 - DNA, 120 bp, Homo sapiens
aggcgggggtgggggggccagctagagtaaagttctagggctggctgaagagtatttggttcaactgagaaccagggaagagaccagtgtaggtgaagcgaagcaaaggaaagagggagg

SEQ ID NO: 38054 - DNA, 120 bp, Homo sapiens
cctcgaagggacatgaactgattagggttttaaccagtgtctagctgctatgcacagaaaggaccgttgaggtggcgagggtcgaagcagggaggccgaggagatgccgccacagcccag

SEQ ID NO: 38055 - DNA, 120 bp, Homo sapiens
aggcgggagggtatggtaatagcagtggcagtggtgaggagagggtcacacaccagagctgatgggaggcaggactgacaccacagttttggggtaagcagctgtggaagggtggatggg

SEQ ID NO: 38056 - DNA, 120 bp, Homo sapiens
tcccggaaggccctgagcggctccatgccatcaaggagcaactgatccaggagggcctcctagatcgctgcgtgtcctttcaggtaaggcccccaagccaacactctgggtgaagggcag

SEQ ID NO: 38057 - DNA, 120 bp, Homo sapiens
gcccggtttgctgaaaaggaagagctgatgttggttcacaggtgaaggcttgggagccttgtagggatggggaggagcctgccctggacaaaccagggcaagctaaacgctttgggaagc

SEQ ID NO: 38058 - DNA, 120 bp, Homo sapiens
agtcgctgagcctttctgaatctgtgtcatcgcctgtaacaaggggaccagtaaacataagttcctcaggagagtttgatgtgtgtcaggtgcttagaacagggcctgatatataatcag

SEQ ID NO: 38059 - DNA, 120 bp, Homo sapiens
gatcggggttcccccaggggcttccagatttagaggcctagtgctatgtggcttgaggaaagctagcttccagagcaggtatctgagctgaactttaagaggagaaaaagagtgagtcag

SEQ ID NO: 38060 - DNA, 120 bp, Homo sapiens
aggcgggctagggaagaaacagaatgtgtcttatatcctggctattccttcaggttgacagttgggggagccaagccctaatttgaccagggggttggtgtatggacagctcagttgggg

SEQ ID NO: 38061 - DNA, 120 bp, Homo sapiens
ctccgtgtcctagcagacacctacgactcagtttatctgcatccggtatggatgagaactctgcgggcagggaatggtggcaatcttggggtccccatccctatgcccaccccaccctgg

SEQ ID NO: 38062 - DNA, 120 bp, Homo sapiens
atgcggtcctgggggctgagatccggaatggcatggccatcattaggtaggactctacagcatttgactttttacattgttttaaagtccttccttcaagtgtaaaatgtattgatatgg

SEQ ID NO: 38063 - DNA, 120 bp, Homo sapiens
cttcgtttttggcatgtaaaatcatggtacatcttatcatcattggcatcccagaactgatgaaatgcaaaagctttctcctccctcccctgtttttaaccacaaatggtagtaacatga

SEQ ID NO: 38064 - DNA, 120 bp, Homo sapiens
gtaaaatcatggtacatcttatcatcattggcatcccagaactgatgaaatgcaaaagctttctcctccctcccctgtttttaaccacaaatggtagtaacatgacatactcccttcgta

SEQ ID NO: 38065 - DNA, 120 bp, Homo sapiens
aagcggggatgggggacaattgctggaggcttctctttggccatcttgctccacctctaccctagtattagcaatttcaaagcagttgggatggaggtagaaggaaagggcgcttggaat

SEQ ID NO: 38066 - DNA, 120 bp, Homo sapiens
gtacgcaacttgaggaagagaggtgatattatcggaatgaatttctttgttgtaagttataaatgtatgggcttttccaatcccatcacccttaaaactttatttgttttctgcagtgag

SEQ ID NO: 38067 - DNA, 120 bp, Homo sapiens
ctccgttgtctttaatatgcttgctttgagttcatggatgaacattcctgcctggctgacatgtggactctctgaaattgttataaggtctttttctttgtttttttcttgatgcccaag

SEQ ID NO: 38068 - DNA, 120 bp, Homo sapiens
aggcgaaccaggattccaaacagccattatgaaaggaaagagagagagacttagggtttgcaaaataagataccctgttgattctttttattccatacagatactactattctttaggaa

SEQ ID NO: 38069 - DNA, 120 bp, Homo sapiens
aaacgttaaaatcacatgatcttccaggacctgggctgcttctttaagaagcatgttacagaaagctttattggccaacaacatattgaaagatagattaatcaatcattcattcaaata

SEQ ID NO: 38070 - DNA, 120 bp, Homo sapiens
caccgtacccttatctcttgcacaatctaacgagggagataaccactctttcaatttatagtgacctataacatttcgtacactgctgaatatctttacatggtaataacacaatggaaa

SEQ ID NO: 38071 - DNA, 120 bp, Homo sapiens
ggtcgttttagtgctgcagaaaatccaagctggaaagggggaggagttccaggcactatttcataataaagaggaggtcacctaaaagtttgactacctaggtagtcagatatctgacat

SEQ ID NO: 38072 - DNA, 120 bp, Homo sapiens
aaacgctagtcttgtgttctaggttccatgacaacttttatggcctacttgggcctaacaaatagcacaatggtagcaggtgacaggtagggcttttttctaaaggtttagttgtgagag

SEQ ID NO: 38073 - DNA, 120 bp, Homo sapiens
tcacgtgaacgggaggaacaggagcggaaggaactacagcgaatgctactgggtgaggatcttggcttcacagacagataaaaaagagaagggttaaaaaaggagcctacgtaactgcag

SEQ ID NO: 38074 - DNA, 120 bp, Homo sapiens
aggcgtgagccactgcgcctggccttaaatgtgcattttctgagaacattcatggctttcagaagaccctcagaaggagtcttagaccataaaaagagttttaaaattgtagaaattgag

SEQ ID NO: 38075 - DNA, 120 bp, Homo sapiens
ctgcgagagaggataaaggctgatgatgaagatttatatggcttctcagtcacagtagtcttccctttgtttcctcttttctgtaaaagttttgtgtaatttcattgttttgggtccttt

SEQ ID NO: 38076 - DNA, 120 bp, Homo sapiens
actcggccttgtgtgcttttatctgtaatgtgatcatcacccacttcctacatggtcttttctcttgcactgttgttcagaggaatctgcttctctatctcctatagcaaacatgtagtt

SEQ ID NO: 38077 - DNA, 120 bp, Homo sapiens
atgtgcgcatacggactacaaaagatgaggaattcatgtgagtttgatttaccacttccttttttttctttgaggacagagtcttgctctgcggcccaggtggagtgcagcggcgtgatc
